(19) United States
(12) Patent Application Publication
(10) Pub. No.: US 2006/0211642 A1
(43) Pub. Date: Sep. 21, 2006

(54) RNA inteference mediated inhibition of hepatitis C virus (HVC) gene expression using short interfering nucleic acid (siNA)

(75) Inventors: James McSwiggen, Boulder, CO (US); David Morrissey, Boulder, CO (US); Roberto Guerciolini, Boulder, CO (US)

Correspondence Address: MCDONNELL BOEHNEN HULBERT & BERGHOFF LLP, 300 S. WACKER DRIVE, 32ND FLOOR, CHICAGO, IL, 60606, US

(73) Assignee: Sirna Therapeutics, Inc., Boulder, CO (US)

(21) Appl. No.: 11/311,826

(22) Filed: Dec. 19, 2005

Related U.S. Application Data
(63) Continuation-in-part of application No. 10/942,560, filed on Sep. 15, 2004.
Application No. 10/942,560 is a continuation-in-part of application No. 10/667,271, filed on Sep. 16, 2003.
Application No. 10/667,271 is a continuation-in-part of application No. PCT/US03/05043, filed on Feb. 20, 2003.
Application No. PCT/US03/05043 is a continuation-in-part of application No. PCT/US02/09187, filed on Mar. 26, 2002.
(63) Continuation-in-part of application No. PCT/US04/16390, filed on May 24, 2004.
Application No. PCT/US04/16390 is a continuation-in-part of application No. 10/826,966, filed on Apr. 16, 2004.
Application No. 10/826,966 is a continuation-in-part of application No. 10/757,803, filed on Jan. 14, 2004.
Application No. 10/757,803 is a continuation-in-part of application No. 10/720,448, filed on Nov. 24, 2003, now abandoned.
Application No. 10/720,448 is a continuation-in-part of application No. 10/693,059, filed on Oct. 23, 2003, now abandoned.
Application No. 10/693,059 is a continuation-in-part of application No. 10/444,853, filed on May 23, 2003.
Application No. 10/444,853 is a continuation-in-part of application No. PCT/US03/05346, filed on Feb. 20, 2003.
Application No. 10/444,853 is a continuation-in-part of application No. PCT/US03/05028, filed on Feb. 20, 2003.
(63) Continuation-in-part of application No. PCT/US04/13456, filed on Apr. 30, 2004.
Application No. PCT/US04/13456 is a continuation-in-part of application No. 10/780,447, filed on Feb. 13, 2004.
Application No. 10/780,447 is a continuation-in-part of application No. 10/427,160, filed on Apr. 30, 2003.
Application No. 10/427,160 is a continuation-in-part of application No. PCT/US02/15876, filed on May 17, 2002.
(63) Continuation-in-part of application No. 10/727,780, filed on Dec. 3, 2003.
(63) Continuation-in-part of application No. PCT/US05/04270, filed on Feb. 9, 2005.
(60) Provisional application No. 60/401,104, filed on Aug. 5, 2002.
(60) Provisional application No. 60/358,580, filed on Feb. 20, 2002.
(60) Provisional application No. 60/358,580, filed on Feb. 20, 2002.
(60) Provisional application No. 60/363,124, filed on Mar. 11, 2002.
(60) Provisional application No. 60/363,124, filed on Mar. 11, 2002.
(60) Provisional application No. 60/386,782, filed on Jun. 6, 2002.
(60) Provisional application No. 60/386,782, filed on Jun. 6, 2002.
(60) Provisional application No. 60/406,784, filed on Aug. 29, 2002.
(60) Provisional application No. 60/406,784, filed on Aug. 29, 2002.
(60) Provisional application No. 60/408,378, filed on Sep. 5, 2002.
(60) Provisional application No. 60/408,378, filed on Sep. 5, 2002.
(60) Provisional application No. 60/409,293, filed on Sep. 9, 2002.
(60) Provisional application No. 60/409,293, filed on Sep. 9, 2002.
(60) Provisional application No. 60/440,129, filed on Jan. 15, 2003.
(60) Provisional application No. 60/440,129, filed on Jan. 15, 2003.
(60) Provisional application No. 60/292,217, filed on May 18, 2001.
(60) Provisional application No. 60/362,016, filed on Mar. 6, 2002.
(60) Provisional application No. 60/306,883, filed on Jul. 20, 2001.
(60) Provisional application No. 60/311,865, filed on Aug. 13, 2001.
(60) Provisional application No. 60/543,480, filed on Feb. 10, 2004.
(60) Provisional application No. 60/678,531, filed on May 6, 2005.
(60) Provisional application No. 60/703,946, filed on Jul. 29, 2005.
(60) Provisional application No. 60/737,024, filed on Nov. 15, 2005.

(51) Int. Cl. A61K 48/00; A61K 9/127

(52) U.S. Cl. 514/44; 424/450

(57) ABSTRACT

This invention relates to compounds, compositions, and methods useful for modulating Hepatitis C Virus (HCV) gene expression using short interfering nucleic acid (siNA) molecules. This invention also relates to compounds, compositions, and methods useful for modulating the expression and activity of other genes involved in pathways of HCV gene expression and/or activity by RNA interference (RNAi) using small nucleic acid molecules. In particular, the instant invention features small nucleic acid molecules, such as short interfering nucleic acid (siNA), short interfering RNA (siRNA), double-stranded RNA (dsRNA), micro-RNA (miRNA), and short hairpin RNA (shRNA) molecules and methods used to modulate the expression of HCV genes, including cocktails of such small nucleic acid molecules and lipid nanoparticle formulations of such such small nucleic acid molecules cocktails thereof. The application also relates to methods of treating diseases and conditions associated with HCV gene expression, such as HCV infection, hepatocellular carcinoma, cirrhosis, liver failure, as well as providing dosing regimens and treatment protocols.

[0001] This invention is a continuation-in-part of U.S. patent application Ser. No. 10/942,560, filed Sep. 15, 2004, which is a continuation-in-part of U.S. patent application Ser. No. 10/667,271, filed Sep. 16, 2003, which is a continuation-in-part of International Patent Application No. PCT/US03/05043, filed Feb. 20, 2003, which is a continuation-in-part of McSwiggen PCT/US02/09187, filed Mar. 26, 2002 and claims the benefit of McSwiggen U.S. Ser. No. 60/401,104, filed Aug. 5, 2002. This application is also a continuation-in-part of International Patent Application No. PCT/US04/16390, filed May 24, 2004, which is a continuation-in-part of U.S. patent application Ser. No. 10/826,966, filed Apr. 16, 2004, which is continuation-in-part of U.S. patent application Ser. No. 10/757,803, filed Jan. 14, 2004, which is a continuation-in-part of U.S. patent application Ser. No. 10/720,448, filed Nov. 24, 2003, which is a continuation-in-part of U.S. patent application Ser. No. 10/693,059, filed Oct. 23, 2003, which is a continuation-in-part of U.S. patent application Ser. No. 10/444,853, filed May 23, 2003, which is a continuation-in-part of International Patent Application No. PCT/US03/05346, filed Feb. 20, 2003, and a continuation-in-part of International Patent Application No. PCT/US03/05028, filed Feb. 20, 2003, both of which claim the benefit of U.S. Provisional Application No. 60/358,580 filed Feb. 20, 2002, U.S. Provisional Application No. 60/363,124 filed Mar. 11, 2002, U.S. Provisional Application No. 60/386,782 filed Jun. 6, 2002, U.S. Provisional Application No. 60/406,784 filed Aug. 29, 2002, U.S. Provisional Application No. 60/408,378 filed Sep. 5, 2002, U.S. Provisional Application No. 60/409,293 filed Sep. 9, 2002, and U.S. Provisional Application No. 60/440,129 filed Jan. 15, 2003. This application is also a continuation-in-part of International Patent Application No. PCT/US04/13456, filed Apr. 30, 2004, which is a continuation-in-part of U.S. patent application Ser. No. 10/780,447, filed Feb. 13, 2004, which is a continuation-in-part of U.S. patent application Ser. No. 10/427,160, filed Apr. 30, 2003, which is a continuation-in-part of International Patent Application No. PCT/US02/15876 filed May 17, 2002, which claims the benefit of U.S. Provisional Application No. 60/292,217, filed May 18, 2001, U.S. Provisional Application No. 60/362,016, filed Mar. 6, 2002, U.S. Provisional Application No. 60/306,883, filed Jul. 20, 2001, and U.S. Provisional Application No. 60/311,865, filed Aug. 13, 2001. This application is also a continuation-in-part of U.S. patent application Ser. No. 10/727,780 filed Dec. 3, 2003. This application is also a continuation-in-part of Internation Patent Application No. PCT/US05/04270, filed Feb. 9, 2005 which claims the benefit of U.S. Provisional Application No. 60/543,480, filed Feb. 10, 2004. This application also claims the benefit of U.S. Provisional Patent Application No. 60/678,531 filed May 6, 2005, U.S. Provisional Patent Application No. 60/703,946, filed Jul. 29, 2005, and U.S. Provisional Patent Application No. 60/737,024, filed Nov. 15, 2005. The instant application claims the benefit of all the listed applications, which are hereby incorporated by reference herein in their entireties, including the drawings.

### FIELD OF THE INVENTION

[0002] The present invention relates to compounds, compositions, and methods for the study, diagnosis, and treatment of traits, diseases and conditions that respond to the modulation of hepatitis C virus (HCV) gene expression and/or activity. The present invention is also directed to compounds, compositions, and methods relating to traits, diseases and conditions that respond to the modulation of expression and/or activity of genes involved in hepatitis C virus (HCV) gene expression pathways or other cellular processes that mediate the maintenance or development of such traits, diseases and conditions. Specifically, the invention relates to double stranded nucleic acid molecules including small nucleic acid molecules, such as short interfering nucleic acid (siNA), short interfering RNA (siRNA), double-stranded RNA (dsRNA), micro-RNA (miRNA), and short hairpin RNA (shRNA) molecules capable of mediating RNA interference (RNAi) against hepatitis C virus (HCV) gene expression. Such small nucleic acid molecules are useful, for example, in providing compositions to prevent, inhibit, or reduce HCV infection, liver failure, hepatocellular carcinoma, cirrhosis, and/or other disease states associated with HCV infection in a subject or organism.

### BACKGROUND OF THE INVENTION

[0003] The following is a discussion of relevant art pertaining to RNAi. The discussion is provided only for understanding of the invention that follows. The summary is not an admission that any of the work described below is prior art to the claimed invention.

[0004] RNA interference refers to the process of sequence-specific post-transcriptional gene silencing in animals mediated by short interfering RNAs (siRNAs) (Zamore et al., 2000, Cell, 101, 25-33; Fire et al., 1998, Nature, 391, 806; Hamilton et al., 1999, Science, 286, 950-951; Lin et al., 1999, Nature, 402, 128-129; Sharp, 1999, Genes & Dev., 13:139-141; and Strauss, 1999, Science, 286, 886). The corresponding process in plants (Heifetz et al., International PCT Publication No. WO 99/61631) is commonly referred to as post-transcriptional gene silencing or RNA silencing and is also referred to as quelling in fungi. The process of post-transcriptional gene silencing is thought to be an evolutionarily-conserved cellular defense mechanism used to prevent the expression of foreign genes and is commonly shared by diverse flora and phyla (Fire et al., 1999, Trends Genet., 15, 358). Such protection from foreign gene expression may have evolved in response to the production of double-stranded RNAs (dsRNAs) derived from viral infection or from the random integration of transposon elements into a host genome via a cellular response that specifically destroys homologous single-stranded RNA or viral genomic RNA. The presence of dsRNA in cells triggers the RNAi response through a mechanism that has yet to be fully characterized. This mechanism appears to be different from other known mechanisms involving double stranded RNA-specific ribonucleases, such as the interferon response that results from dsRNA-mediated activation of protein kinase PKR and 2′,5′-oligoadenylate synthetase resulting in non-specific cleavage of mRNA by ribonuclease L (see for example U.S. Pat. Nos. 6,107,094; 5,898,031; Clemens et al., 1997, J. Interferon & Cytokine Res., 17, 503-524; Adah et al., 2001, Curr. Med. Chem., 8, 1189).

[0005] The presence of long dsRNAs in cells stimulates the activity of a ribonuclease III enzyme referred to as dicer (Bass, 2000, Cell, 101, 235; Zamore et al., 2000, Cell, 101, 25-33; Hammond et al., 2000, Nature, 404, 293). Dicer is involved in the processing of the dsRNA into short pieces of dsRNA known as short interfering RNAs (siRNAs) (Zamore et al., 2000, Cell, 101, 25-33; Bass, 2000, Cell, 101, 235; Berstein et al., 2001, Nature, 409, 363). Short interfering RNAs derived from dicer activity are typically about 21 to about 23 nucleotides in length and comprise about 19 base pair duplexes (Zamore et al., 2000, Cell, 101, 25-33; Elbashir et al., 2001, Genes Dev., 15, 188). Dicer has also been implicated in the excision of 21- and 22-nucleotide small temporal RNAs (stRNAs) from precursor RNA of conserved structure that are implicated in translational control (Hutvagner et al., 2001, Science, 293, 834). The RNAi response also features an endonuclease complex, commonly referred to as an RNA-induced silencing complex (RISC), which mediates cleavage of single-stranded RNA having sequence complementary to the antisense strand of the siRNA duplex. Cleavage of the target RNA takes place in the middle of the region complementary to the antisense strand of the siRNA duplex (Elbashir et al., 2001, Genes Dev., 15, 188).

[0006] RNAi has been studied in a variety of systems. Fire et al., 1998, Nature, 391, 806, were the first to observe RNAi in C. elegans. Bahramian and Zarbl, 1999, Molecular and Cellular Biology, 19, 274-283 and Wianny and Goetz, 1999, Nature Cell Biol., 2, 70, describe RNAi mediated by dsRNA in mammalian systems. Hammond et al., 2000, Nature, 404, 293, describe RNAi in Drosophila cells transfected with dsRNA. Elbashir et al., 2001, Nature, 411, 494 and Tuschl et al., International PCT Publication No. WO 01/75164, describe RNAi induced by introduction of duplexes of synthetic 21-nucleotide RNAs in cultured mammalian cells including human embryonic kidney and HeLa cells. Recent work in Drosophila embryonic lysates (Elbashir et al., 2001, EMBO J., 20, 6877 and Tuschl et al., International PCT Publication No. WO 01/75164) has revealed certain requirements for siRNA length, structure, chemical composition, and sequence that are essential to mediate efficient RNAi activity. These studies have shown that 21-nucleotide siRNA duplexes are most active when containing 3′-terminal dinucleotide overhangs. Furthermore, complete substitution of one or both siRNA strands with 2′-deoxy (2′-H) or 2′-O-methyl nucleotides abolishes RNAi activity, whereas substitution of the 3′-terminal siRNA overhang nucleotides with 2′-deoxy nucleotides (2′-H) was shown to be tolerated. Single mismatch sequences in the center of the siRNA duplex were also shown to abolish RNAi activity. In addition, these studies also indicate that the position of the cleavage site in the target RNA is defined by the 5′-end of the siRNA guide sequence rather than the 3′-end of the guide sequence (Elbashir et al., 2001, EMBO J, 20, 6877). Other studies have indicated that a 5′-phosphate on the target-complementary strand of a siRNA duplex is required for siRNA activity and that ATP is utilized to maintain the 5′-phosphate moiety on the siRNA (Nykanen et al., 2001, Cell, 107, 309).

[0007] Studies have shown that replacing the 3′-terminal nucleotide overhanging segments of a 21-mer siRNA duplex having two-nucleotide 3′-overhangs with deoxyribonucleotides does not have an adverse effect on RNAi activity. Replacing up to four nucleotides on each end of the siRNA with deoxyribonucleotides has been reported to be well tolerated, whereas complete substitution with deoxyribonucleotides results in no RNAi activity (Elbashir et al., 2001, EMBO J., 20, 6877 and Tuschl et al., International PCT Publication No. WO 01/75164). In addition, Elbashir et al., supra, also report that substitution of siRNA with 2′-O-methyl nucleotides completely abolishes RNAi activity. Li et al., International PCT Publication No. WO 00/44914, and Beach et al., International PCT Publication No. WO 01/68836 preliminarily suggest that siRNA may include modifications to either the phosphate-sugar backbone or the nucleoside to include at least one of a nitrogen or sulfur heteroatom, however, neither application postulates to what extent such modifications would be tolerated in siRNA molecules, nor provides any further guidance or examples of such modified siRNA. Kreutzer et al., Canadian Patent Application No. 2,359,180, also describe certain chemical modifications for use in dsRNA constructs in order to counteract activation of double-stranded RNA-dependent protein kinase PKR, specifically 2′-amino or 2′-O-methyl nucleotides, and nucleotides containing a 2′-O or 4′-C methylene bridge. However, Kreutzer et al. similarly fails to provide examples or guidance as to what extent these modifications would be tolerated in dsRNA molecules.

[0008] Parrish et al., 2000, Molecular Cell, 6, 1077-1087, tested certain chemical modifications targeting the unc-22 gene in C. elegans using long (>25 nt) siRNA transcripts. The authors describe the introduction of thiophosphate residues into these siRNA transcripts by incorporating thiophosphate nucleotide analogs with T7 and T3 RNA polymerase and observed that RNAs with two phosphorothioate modified bases also had substantial decreases in effectiveness as RNAi. Further, Parrish et al. reported that phosphorothioate modification of more than two residues greatly destabilized the RNAs in vitro such that interference activities could not be assayed. Id. at 1081. The authors also tested certain modifications at the 2′-position of the nucleotide sugar in the long siRNA transcripts and found that substituting deoxynucleotides for ribonucleotides produced a substantial decrease in interference activity, especially in the case of Uridine to Thymidine and/or Cytidine to deoxy-Cytidine substitutions. Id. In addition, the authors tested certain base modifications, including substituting, in sense and antisense strands of the siRNA, 4-thiouracil, 5-bromouracil, 5-iodouracil, and 3-(aminoallyl)uracil for uracil, and inosine for guanosine. Whereas 4-thiouracil and 5-bromouracil substitution appeared to be tolerated, Parrish reported that inosine produced a substantial decrease in interference activity when incorporated in either strand. Parrish also reported that incorporation of 5-iodouracil and 3-(aminoallyl)uracil in the antisense strand resulted in a substantial decrease in RNAi activity as well.

[0009] The use of longer dsRNA has been described. For example, Beach et al., International PCT Publication No. WO 01/68836, describes specific methods for attenuating gene expression using endogenously-derived dsRNA. Tuschl et al., International PCT Publication No. WO 01/75164, describe a Drosophila in vitro RNAi system and the use of specific siRNA molecules for certain functional genomic and certain therapeutic applications; although Tuschl, 2001, Chem. Biochem., 2, 239-245, doubts that RNAi can be used to cure genetic diseases or viral infection due to the danger of activating interferon response. Li et al., International PCT Publication No. WO 00/44914, describe the use of specific long (141 bp-488 bp) enzymatically synthesized or vector expressed dsRNAs for attenuating the expression of certain target genes. Zernicka-Goetz et al., International PCT Publication No. WO 01/36646, describe certain methods for inhibiting the expression of particular genes in mammalian cells using certain long (550 bp-714 bp), enzymatically synthesized or vector expressed dsRNA molecules. Fire et al., International PCT Publication No. WO 99/32619, describe particular methods for introducing certain long dsRNA molecules into cells for use in inhibiting gene expression in nematodes. Plaetinck et al., International PCT Publication No. WO 00/01846, describe certain methods for identifying specific genes responsible for conferring a particular phenotype in a cell using specific long dsRNA molecules. Mello et al., International PCT Publication No. WO 01/29058, describe the identification of specific genes involved in dsRNA-mediated RNAi. Pachuck et al., International PCT Publication No. WO 00/63364, describe certain long (at least 200 nucleotide) dsRNA constructs. Deschamps Depaillette et al., International PCT Publication No. WO 99/07409, describe specific compositions consisting of particular dsRNA molecules combined with certain anti-viral agents. Waterhouse et al., International PCT Publication No. 99/53050 and 1998, PNAS, 95, 13959-13964, describe certain methods for decreasing the phenotypic expression of a nucleic acid in plant cells using certain dsRNAs. Driscoll et al., International PCT Publication No. WO 01/49844, describe specific DNA expression constructs for use in facilitating gene silencing in targeted organisms.

[0010] Others have reported on various RNAi and gene-silencing systems. For example, Parrish et al., 2000, Molecular Cell, 6, 1077-1087, describe specific chemically-modified dsRNA constructs targeting the unc-22 gene of C. elegans. Grossniklaus, International PCT Publication No. WO 01/38551, describes certain methods for regulating polycomb gene expression in plants using certain dsRNAs. Churikov et al., International PCT Publication No. WO 01/42443, describe certain methods for modifying genetic characteristics of an organism using certain dsRNAs. Cogoni et al, International PCT Publication No. WO 01/53475, describe certain methods for isolating a Neurospora silencing gene and uses thereof. Reed et al., International PCT Publication No. WO 01/68836, describe certain methods for gene silencing in plants. Honer et al., International PCT Publication No. WO 01/70944, describe certain methods of drug screening using transgenic nematodes as Parkinson's Disease models using certain dsRNAs. Deak et al., International PCT Publication No. WO 01/72774, describe certain Drosophila-derived gene products that may be related to RNAi in Drosophila. Arndt et al., International PCT Publication No. WO 01/92513 describe certain methods for mediating gene suppression by using factors that enhance RNAi. Tuschl et al., International PCT Publication No. WO 02/44321, describe certain synthetic siRNA constructs. Pachuk et al., International PCT Publication No. WO 00/63364, and Satishchandran et al., International PCT Publication No. WO 01/04313, describe certain methods and compositions for inhibiting the function of certain polynucleotide sequences using certain long (over 250 bp), vector expressed dsRNAs. Echeverri et al., International PCT Publication No. WO 02/38805, describe certain C. elegans genes identified via RNAi. Kreutzer et al., International PCT Publications Nos. WO 02/055692, WO 02/055693, and EP 1144623 B1 describes certain methods for inhibiting gene expression using dsRNA. Graham et al., International PCT Publications Nos. WO 99/49029 and WO 01/70949, and AU 4037501 describe certain vector expressed siRNA molecules. Fire et al., U.S. Pat. No. 6,506,559, describe certain methods for inhibiting gene expression in vitro using certain long dsRNA (299 bp-1033 bp) constructs that mediate RNAi. Martinez et al., 2002, Cell, 110, 563-574, describe certain single stranded siRNA constructs, including certain 5′-phosphorylated single stranded siRNAs that mediate RNA interference in Hela cells. Harborth et al., 2003, Antisense & Nucleic Acid Drug Development, 13, 83-105, describe certain chemically and structurally modified siRNA molecules. Chiu and Rana, 2003, RNA, 9, 1034-1048, describe certain chemically and structurally modified siRNA molecules. Woolf et al., International PCT Publication Nos. WO 03/064626 and WO 03/064625 describe certain chemically modified dsRNA constructs. Hornung et al., 2005, Nature Medicine, 11, 263-270, describe the sequence-specific potent induction of IFN-alpha by short interfering RNA in plasmacytoid dendritic cells through TLR7. Judge et al., 2005, Nature Biotechnology, Published online: 20 Mar. 2005, describe the sequence-dependent stimulation of the mammalian innate immune response by synthetic siRNA. Yuki et al, International PCT Publication Nos. WO 05/049821 and WO 04/048566, describe certain methods for designing short interfering RNA sequences and certain short interfering RNA sequences with optimized activity. Saigo et al., U.S. Patent application Publication No. US20040539332, describe certain methods of designing oligo- or polynucleotide sequences, including short interfering RNA sequences, for achieving RNA interference. Tei et al., International PCT Publication No. WO 03/044188, describe certain methods for inhibiting expression of a target gene, which comprises transfecting a cell, tissue, or individual organism with a double-stranded polynucleotide comprising DNA and RNA having a substantially identical nucleotide sequence with at least a partial nucleotide sequence of the target gene.

[0011] McCaffrey et al., 2002, Nature, 418, 38-39, describes the use of certain siRNA constructs targeting a chimeric HCV NS5B protein/luciferase transcript in mice.

[0012] Randall et al., 2003, PNAS USA, 100, 235-240, describe certain siRNA constructs targeting HCV RNA in Huh7 hepatoma cell lines.

### SUMMARY OF THE INVENTION

[0013] This invention relates to compounds, compositions, and methods useful for modulating the expression of genes, such as those genes associated with the development or maintenance of HCV infection, liver failure, hepatocellular carcinoma, cirrhosis, and/or other disease states associated with HCV infection, by RNA interference (RNAi) using short interfering nucleic acid (siNA) molecules. This invention also relates to compounds, compositions, and methods useful for modulating the expression and activity of other genes involved in pathways of HCV gene expression and/or activity by RNA interference (RNAi) using small nucleic acid molecules. In particular, the instant invention features small nucleic acid molecules, such as short interfering nucleic acid (siNA), short interfering RNA (siRNA), double-stranded RNA (dsRNA), micro-RNA (miRNA), and short hairpin RNA (shRNA) molecules and methods used to modulate the expression of HCV genes and/or other genes (e.g., cellular or host genes) involved in pathways of HCV gene expression and/or infection.

[0014] A siNA of the invention can be unmodified or chemically-modified. A siNA of the instant invention can be chemically synthesized, expressed from a vector or enzymatically synthesized. The instant invention also features various chemically-modified synthetic short interfering nucleic acid (siNA) molecules capable of modulating target gene expression or activity in cells by RNA interference (RNAi). The use of chemically-modified siNA improves various properties of native siNA molecules through increased resistance to nuclease degradation in vivo and/or through improved cellular uptake. Further, contrary to earlier published studies, siNA having multiple chemical modifications retains its RNAi activity. The siNA molecules of the instant invention provide useful reagents and methods for a variety of therapeutic, cosmetic, veterinary, diagnostic, target validation, genomic discovery, genetic engineering, and pharmacogenomic applications.

[0015] In one embodiment, the invention features one or more siNA molecules and methods that independently or in combination modulate the expression of gene(s) encoding HCV and/or cellular proteins associated with the maintenance or development of HCV infection, liver failure, hepatocellular carcinoma, and cirrhosis, such as genes encoding sequences comprising those sequences referred to by GenBank Accession Nos. shown in Table I, referred to herein generally as HCV. The description below of the various aspects and embodiments of the invention is provided with reference to exemplary hepatitis C virus (HCV) genes, generally referred to herein as HCV. However, such reference is meant to be exemplary only and the various aspects and embodiments of the invention are also directed to other genes that express alternate HCV genes, such as mutant HCV genes, splice variants of HCV genes, and genes encoding different strains of HCV, as well as as cellular targets for HCV, such as those described herein and also referred to by GenBank Accession Nos. herein and in U.S. Ser. No. 10/923,536 and U.S. Ser. No. 10/923,536, both incorporated by reference herein. The various aspects and embodiments are also directed to other genes involved in HCV pathways, including genes that encode cellular proteins involved in the maintenance and/or development of HCV infection, liver failure, hepatocellular carcinoma, and cirrhosis or other genes that express other proteins associated with HCV infection, such as cellular proteins that are utilized in the HCV life-cycle. Such additional genes can be analyzed for target sites using the methods described herein for HCV. Thus, the inhibition and the effects of such inhibition of the other genes can be performed as described herein. In other words, the term “HCV” as it is defined herein below and recited in the described embodiments, is meant to encompass genes associated with the development and/or maintenance of HCV infection, such as genes which encode HCV polypeptides, including polypeptides of different strains of HCV, mutant HCV genes, and splice variants of HCV genes, as well as cellular genes involved in HCV pathways of gene expression, replication, and/or HCV activity. Also, the term “HCV” as it is defined herein below and recited in the described embodiments, is meant to encompass HCV viral gene products and cellular gene products involved in HCV infection, such as those described herein. Thus, each of the embodiments described herein with reference to the term “HCV” are applicable to all of the virus, cellular and viral protein, peptide, polypeptide, and/or polynucleotide molecules covered by the term “HCV”; as that term is defined herein. Comprehensively, such gene targets are also referred to herein generally as “target” sequences.

[0016] In one embodiment, the invention features a composition comprising two or more different siNA molecules of the invention targeting different polynucleotide targets, such as different regions of HCV RNA (e.g., two different target sites herein), different viral strains (e.g., HCV strains, or HIV and HCV, HCV and HBV etc.), or different viral and cellular targets (e.g., a HCV target and a cellular target). Such pools of siNA molecules can prevent or overcome viral resistance or otherwise provide increased therapeutic effect.

[0017] In one embodiment, the invention features siNA molecules having RNAi specificity for the HCV minus strand, for example, Genbank Accession No. HPCK1S1, Hepatitis C virus (strain HCV-1b, clone HCV-K1-S1), complete genome; Genbank Accession No. D50483, 9410 nt.

[0018] In one embodiment, the invention features one or more siNA molecules and methods that independently or in combination modulate the expression of genes representing cellular targets for HCV infection, such as cellular receptors, cell surface molecules, cellular enzymes, cellular transcription factors, and/or cytokines, second messengers, and cellular accessory molecules including, but not limited to, La antigen (see for example Costa-Mattioli et al., 2004, Mol Cell Biol., 24, 6861-70, e.g., Genbank Accession No. NM_{—}003142); FAS (e.g., Genbank Accession No. NM_{—}000043) or FAS ligand (e.g., Genbank Accession No. NM_{—}000639); interferon regulatory factors (IRFs; e.g., Genbank Accession No. AF082503.1); cellular PKR protein kinase (e.g., Genbank Accession No. XM_{—}002661.7); human eukaryotic initiation factors 2B (elF2Bgamma; e.g., Genbank Accession No. AF256223, and/or elF2gamma; e.g., Genbank Accession No. NM_{—}006874.1); human DEAD Box protein (DDX3; e.g., Genbank Accession No. XM_{—}018021.2); and cellular proteins that bind to the poly(U) tract of the HCV 3′-UTR, such as polypyrimidine tract-binding protein (e.g., Genbank Accession Nos. NM_{—}031991.1 and XM_{—}042972.3). Such cellular targets are also referred to herein generally as HCV targets, and specifically as “host target” or “host targets”.

[0019] Due to the high sequence variability of the HCV genome, selection of siNA molecules for broad therapeutic applications likely involve the conserved regions of the HCV genome. In one embodiment, the present invention relates to siNA molecules that target the conserved regions of the HCV genome. Examples of conserved regions of the HCV genome include, but are not limited to, the 5′-Non Coding Region (NCR, also referred to as the 5′-untranslated region, UTR), the 5′-end of the core protein coding region, and the 3′-NCR. HCV genomic RNA contains an internal ribosome entry site (IRES) in the 5′-NCR which mediates translation independently of a 5′-cap structure (Wang et al., 1993, J. Virol., 67, 3338-44). The full-length sequence of the HCV RNA genome is heterologous among clinically isolated subtypes, of which there are at least fifteen (Simmonds, 1995, Hepatology, 21, 570-583), however, the 5′-NCR sequence of HCV is highly conserved across all known subtypes, most likely to preserve the shared IRES mechanism (Okamoto et al., 1991, J. General Virol., 72, 2697-2704). Therefore, a siNA molecule can be designed to target the different isolates of HCV by targeting a conserved region, such as the 5′ NCR sequence. siNA molecules designed to target conserved regions of various HCV isolates enable efficient inhibition of HCV replication in diverse patient populations and ensure the effectiveness of the siNA molecules against HCV quasi species which evolve due to mutations in the non-conserved regions of the HCV genome. As described, a single siNA molecule can be targeted against all isolates of HCV by designing the siNA molecule to interact with conserved nucleotide sequences of HCV (e.g., sequences that are expected to be present in the RNA of various HCV isolates).

[0020] In one embodiment, the invention features a double stranded nucleic acid molecule, such as an siNA molecule, where one of the strands comprises nucleotide sequence having complementarity to a predetermined nucleotide sequence in a HCV target nucleic acid molecule, or a portion thereof. In one embodiment, the predetermined nucleotide sequence is a nucleotide HCV target sequence described herein. In another embodiment, the predetermined nucleotide sequence is a HCV target sequence as is known in the art.

[0021] In one embodiment, the invention features a double-stranded short interfering nucleic acid (siNA) molecule that down-regulates expression of a HCV target gene or that directs cleavage of a HCV target RNA, wherein said siNA molecule comprises about 15 to about 28 base pairs.

[0022] In one embodiment, the invention features a double-stranded short interfering nucleic acid (siNA) molecule that directs cleavage of a HCV target RNA, wherein said siNA molecule comprises about 15 to about 28 base pairs.

[0023] In one embodiment, the invention features a double stranded short interfering nucleic acid (siNA) molecule that directs cleavage of a HCV target RNA via RNA interference (RNAi), wherein the double stranded siNA molecule comprises a first and a second strand, each strand of the siNA molecule is about 18 to about 28 nucleotides in length, the first strand of the siNA molecule comprises nucleotide sequence having sufficient complementarity to the HCV target RNA for the siNA molecule to direct cleavage of the HCV target RNA via RNA interference, and the second strand of said siNA molecule comprises nucleotide sequence that is complementary to the first strand.

[0024] In one embodiment, the invention features a double stranded short interfering nucleic acid (siNA) molecule that directs cleavage of a HCV target RNA via RNA interference (RNAi), wherein the double stranded siNA molecule comprises a first and a second strand, each strand of the siNA molecule is about 18 to about 23 nucleotides in length, the first strand of the siNA molecule comprises nucleotide sequence having sufficient complementarity to the HCV target RNA for the siNA molecule to direct cleavage of the HCV target RNA via RNA interference, and the second strand of said siNA molecule comprises nucleotide sequence that is complementary to the first strand.

[0025] In one embodiment, the invention features a chemically synthesized double stranded short interfering nucleic acid (siNA) molecule that directs cleavage of a HCV target RNA via RNA interference (RNAi), wherein each strand of the siNA molecule is about 18 to about 28 nucleotides in length; and one strand of the siNA molecule comprises nucleotide sequence having sufficient complementarity to the HCV target RNA for the siNA molecule to direct cleavage of the HCV target RNA via RNA interference.

[0026] In one embodiment, the invention features a chemically synthesized double stranded short interfering nucleic acid (siNA) molecule that directs cleavage of a HCV target RNA via RNA interference (RNAi), wherein each strand of the siNA molecule is about 18 to about 23 nucleotides in length; and one strand of the siNA molecule comprises nucleotide sequence having sufficient complementarity to the HCV target RNA for the siNA molecule to direct cleavage of the HCV target RNA via RNA interference.

[0027] In one embodiment, the invention features a siNA molecule that down-regulates expression of a HCV target gene or that directs cleavage of a HCV target RNA, for example, wherein the HCV target gene or RNA comprises protein encoding sequence. In one embodiment, the invention features a siNA molecule that down-regulates expression of a HCV target gene or that directs cleavage of a HCV target RNA, for example, wherein the HCV target gene or RNA comprises non-coding sequence or regulatory elements involved in HCV target gene expression (e.g., non-coding RNA).

[0028] In one embodiment, a siNA of the invention is used to inhibit the expression of HCV target genes or a HCV target gene family (e.g., different HCV strains), wherein the genes or gene family sequences share sequence homology. Such homologous sequences can be identified as is known in the art, for example using sequence alignments. siNA molecules can be designed to target such homologous sequences, for example using perfectly complementary sequences or by incorporating non-canonical base pairs, for example mismatches and/or wobble base pairs, that can provide additional HCV target sequences. In instances where mismatches are identified, non-canonical base pairs (for example, mismatches and/or wobble bases) can be used to generate siNA molecules that HCV target more than one gene sequence. In a non-limiting example, non-canonical base pairs such as UU and CC base pairs are used to generate siNA molecules that are capable of HCV targeting sequences for differing polynucleotide HCV targets that share sequence homology. As such, one advantage of using siNAs of the invention is that a single siNA can be designed to include nucleic acid sequence that is complementary to the nucleotide sequence that is conserved between the homologous genes. In this approach, a single siNA can be used to inhibit expression of more than one gene instead of using more than one siNA molecule to target the different genes.

[0029] In one embodiment, the invention features a siNA molecule having RNAi activity against HCV target RNA (e.g., coding or non-coding RNA), wherein the siNA molecule comprises a sequence complementary to any RNA sequence, such as those sequences having GenBank Accession Nos. shown in U.S. Ser. No. 10/923,536 and U.S. Ser. No. 10/923,536, both incorporated by reference herein. In another embodiment, the invention features a siNA molecule having RNAi activity against HCV target RNA, wherein the siNA molecule comprises a sequence complementary to an RNA having variant encoding sequence, for example other mutant genes known in the art to be associated with the maintenance and/or development of diseases, traits, disorders, and/or conditions described herein or otherwise known in the art. Chemical modifications as shown in Table IV or otherwise described herein can be applied to any siNA construct of the invention. In another embodiment, a siNA molecule of the invention includes a nucleotide sequence that can interact with nucleotide sequence of a HCV target gene and thereby mediate silencing of HCV target gene expression, for example, wherein the siNA mediates regulation of HCV target gene expression by cellular processes that modulate the chromatin structure or methylation patterns of the HCV target gene and prevent transcription of the HCV target gene.

[0030] In one embodiment, siNA molecules of the invention are used to down regulate or inhibit the expression of proteins arising from haplotype polymorphisms that are associated with a trait, disease or condition in a subject or organism. Analysis of genes, or protein or RNA levels can be used to identify subjects with such polymorphisms or those subjects who are at risk of developing traits, conditions, or diseases described herein. These subjects are amenable to treatment, for example, treatment with siNA molecules of the invention and any other composition useful in treating diseases related to target gene expression. As such, analysis of protein or RNA levels can be used to determine treatment type and the course of therapy in treating a subject. Monitoring of protein or RNA levels can be used to predict treatment outcome and to determine the efficacy of compounds and compositions that modulate the level and/or activity of certain proteins associated with a trait, disorder, condition, or disease.

[0031] In one embodiment of the invention a siNA molecule comprises an antisense strand comprising a nucleotide sequence that is complementary to a nucleotide sequence or a portion thereof encoding a HCV target protein. The siNA further comprises a sense strand, wherein said sense strand comprises a nucleotide sequence of a HCV target gene or a portion thereof.

[0032] In another embodiment, a siNA molecule comprises an antisense region comprising a nucleotide sequence that is complementary to a nucleotide sequence encoding a HCV target protein or a portion thereof. The siNA molecule further comprises a sense region, wherein said sense region comprises a nucleotide sequence of a HCV target gene or a portion thereof.

[0033] In another embodiment, the invention features a siNA molecule comprising nucleotide sequence, for example, nucleotide sequence in the antisense region of the siNA molecule that is complementary to a nucleotide sequence or portion of sequence of a HCV target gene. In another embodiment, the invention features a siNA molecule comprising a region, for example, the antisense region of the siNA construct, complementary to a sequence comprising a HCV target gene sequence or a portion thereof.

[0034] In one embodiment, the sense region or sense strand of a siNA molecule of the invention is complementary to that portion of the antisense region or antisense strand of the siNA molecule that is complementary to a HCV target polynucleotide sequence.

[0035] In yet another embodiment, the invention features a siNA molecule comprising a sequence, for example, the antisense sequence of the siNA construct, complementary to a sequence or portion of sequence comprising sequence represented by GenBank Accession Nos. shown in Table I and in U.S. Ser. No. 10/923,536 and U.S. Ser. No. 10/923,536, both incorporated by reference herein. Chemical modifications in Tables III and IV and described herein can be applied to any siNA construct of the invention.

[0036] In one embodiment of the invention a siNA molecule comprises an antisense strand having about 15 to about 30 (e.g., about 15, 16, 17, 18, 19, 20, 21, 22, 23, 24, 25, 26, 27, 28, 29, or 30) nucleotides, wherein the antisense strand is complementary to a HCV target RNA sequence or a portion thereof, and wherein said siNA further comprises a sense strand having about 15 to about 30 (e.g., about 15, 16, 17, 18, 19, 20, 21, 22, 23, 24, 25, 26, 27, 28, 29, or 30) nucleotides, and wherein said sense strand and said antisense strand are distinct nucleotide sequences where at least about 15 nucleotides in each strand are complementary to the other strand.

[0037] In another embodiment of the invention a siNA molecule of the invention comprises an antisense region having about 15 to about 30 (e.g., about 15, 16, 17, 18, 19, 20, 21, 22, 23, 24, 25, 26, 27, 28, 29, or 30) nucleotides, wherein the antisense region is complementary to a HCV target DNA sequence, and wherein said siNA further comprises a sense region having about 15 to about 30 (e.g., about 15, 16, 17, 18, 19, 20, 21, 22, 23, 24, 25, 26, 27, 28, 29, or 30) nucleotides, wherein said sense region and said antisense region are comprised in a linear molecule where the sense region comprises at least about 15 nucleotides that are complementary to the antisense region.

[0038] In one embodiment, a siNA molecule of the invention has RNAi activity that modulates expression of RNA encoded by a HCV gene. Because HCV genes can share some degree of sequence homology with each other, siNA molecules can be designed to target a class of HCV genes (e.g., a class of different HCV strains) or alternately specific HCV genes (e.g., escape mutants, resistant strains, or other polymorphic variants) by selecting sequences that are either shared amongst different HCV targets or alternatively that are unique for a specific HCV target. Therefore, in one embodiment, the siNA molecule can be designed to target conserved regions of HCV RNA sequences having homology among several HCV gene variants so as to target a class of HCV genes with one siNA molecule. Accordingly, in one embodiment, the siNA molecule of the invention modulates the expression of one or more HCV stains in a subject or organism. In another embodiment, the siNA molecule can be designed to target a sequence that is unique to a specific HCV RNA sequence (e.g., a single HCV strain or HCV single nucleotide polymorphism (SNP)) due to the high degree of specificity that the siNA molecule requires to mediate RNAi activity.

[0039] In one embodiment, nucleic acid molecules of the invention that act as mediators of the RNA interference gene silencing response are double-stranded nucleic acid molecules. In another embodiment, the siNA molecules of the invention consist of duplex nucleic acid molecules containing about 15 to about 30 base pairs between oligonucleotides comprising about 15 to about 30 (e.g., about 15, 16, 17, 18, 19, 20, 21, 22, 23, 24, 25, 26, 27, 28, 29, or 30) nucleotides. In yet another embodiment, siNA molecules of the invention comprise duplex nucleic acid molecules with overhanging ends of about 1 to about 3 (e.g., about 1, 2, or 3) nucleotides, for example, about 21-nucleotide duplexes with about 19 base pairs and 3′-terminal mononucleotide, dinucleotide, or trinucleotide overhangs. In yet another embodiment, siNA molecules of the invention comprise duplex nucleic acid molecules with blunt ends, where both ends are blunt, or alternatively, where one of the ends is blunt.

[0040] In one embodiment, a double stranded nucleic acid (e.g., siNA) molecule comprises nucleotide or non-nucleotide overhangs. By “overhang” is meant a terminal portion of the nucleotide sequence that is not base paired between the two strands of a double stranded nucleic acid molecule (see for example FIG. 6). In one embodiment, a double stranded nucleic acid molecule of the invention can comprise nucleotide or non-nucleotide overhangs at the 3′-end of one or both strands of the double stranded nucleic acid molecule. For example, a double stranded nucleic acid molecule of the invention can comprise a nucleotide or non-nucleotide overhang at the 3′-end of the guide strand or antisense strand/region, the 3′-end of the passenger strand or sense strand/region, or both the guide strand or antisense strand/region and the passenger strand or sense strand/region of the double stranded nucleic acid molecule. In another embodiment, the nucleotide overhang portion of a double stranded nucleic acid (siNA) molecule of the invention comprises 2′-O-methyl, 2′-deoxy, 2′-deoxy-2′-fluoro, 4′-thio, 2′-O-trifluoromethyl, 2′-O-ethyl-trifluoromethoxy, 2′-O-difluoromethoxy-ethoxy, universal base, acyclic, or 5-C-methyl nucleotides. In another embodiment, the non-nucleotide overhang portion of a double stranded nucleic acid (siNA) molecule of the invention comprises glyceryl, abasic, or inverted deoxy abasic non-nucleotides.

[0041] In one embodiment, the nucleotides comprising the overhang portions of a double stranded nucleic acid (e.g., siNA) molecule of the invention correspond to the nucleotides comprising the HCV target polynucleotide sequence of the siNA molecule. Accordingly, in such embodiments, the nucleotides comprising the overhang portion of a siNA molecule of the invention comprise sequence based on the HCV target polynucleotide sequence in which nucleotides comprising the overhang portion of the guide strand or antisense strand/region of a siNA molecule of the invention can be complementary to nucleotides in the HCV target polynucleotide sequence and nucleotides comprising the overhang portion of the passenger strand or sense strand/region of a siNA molecule of the invention can comprise the nucleotides in the HCV target polynucleotide sequence. Such nucleotide overhangs comprise sequence that would result from Dicer processing of a native dsRNA into siRNA.

[0042] In one embodiment, the nucleotides comprising the overhang portion of a double stranded nucleic acid (e.g., siNA) molecule of the invention are complementary to the HCV target polynucleotide sequence and are optionally chemically modified as described herein. As such, in one embodiment, the nucleotides comprising the overhang portion of the guide strand or antisense strand/region of a siNA molecule of the invention can be complementary to nucleotides in the HCV target polynucleotide sequence, i.e. those nucleotide positions in the HCV target polynucleotide sequence that are complementary to the nucleotide positions of the overhang nucleotides in the guide strand or antisense strand/region of a siNA molecule. In another embodiment, the nucleotides comprising the overhang portion of the passenger strand or sense strand/region of a siNA molecule of the invention can comprise the nucleotides in the HCV target polynucleotide sequence, i.e. those nucleotide positions in the HCV target polynucleotide sequence that correspond to same the nucleotide positions of the overhang nucleotides in the passenger strand or sense strand/region of a siNA molecule. In one embodiment, the overhang comprises a two nucleotide (e.g., 3′-GA; 3′-GU; 3′-GG; 3′GC; 3′-CA; 3′-CU; 3′-CG; 3′CC; 3′-UA; 3′-UU; 3′-UG; 3′UC; 3′-AA; 3′-AU; 3′-AG; 3′-AC; 3′-TA; 3′-TU; 3′-TG; 3′-TC; 3′-AT; 3′-UT; 3′-GT; 3′-CT) overhang that is complementary to a portion of the HCV target polynucleotide sequence. In one embodiment, the overhang comprises a two nucleotide (e.g., 3′-GA; 3′-GU; 3′-GG; 3′GC; 3′-CA; 3′-CU; 3′-CG; 3′CC; 3′-UA; 3′-UU; 3′-UG; 3′UC; 3′-AA; 3′-AU; 3′-AG; 3′-AC; 3′-TA; 3′-TU; 3′-TG; 3′-TC; 3′-AT; 3′-UT; 3′-GT; 3′-CT) overhang that is not complementary to a portion of the HCV target polynucleotide sequence. In another embodiment, the overhang nucleotides of a siNA molecule of the invention are 2′-O-methyl nucleotides and/or 2′-deoxy-2′-fluoro nucleotides. In another embodiment, the overhang nucleotides of a siNA molecule of the invention are 2′-O-methyl nucleotides in the event the overhang nucleotides are purine nucleotides and/or 2′-deoxy-2′-fluoro nucleotides in the event the overhang nucleotides are pyrimidines nucleotides. In another embodiment, the purine nucleotide (when present) in an overhang of siNA molecule of the invention is 2′-O-methyl nucleotides. In another embodiment, the pyrimidine nucleotide (when present) in an overhang of siNA molecule of the invention is 2′-deoxy-2′-fluoro nucleotides nucleotide.

[0043] In one embodiment, the nucleotides comprising the overhang portion of a double stranded nucleic acid (e.g., siNA) molecule of the invention are not complementary to the HCV target polynucleotide sequence and are optionally chemically modified as described herein. In one embodiment, the overhang comprises a 3′-UU overhang that is not complementary to a portion of the HCV target polynucleotide sequence. In another embodiment, the nucleotides comprising the overhanging portion of a siNA molecule of the invention are 2′-O-methyl nucleotides and/or 2′-deoxy-2′-fluoro nucleotides.

[0044] In one embodiment, the double stranded nucleic molecule (e.g. siNA) of the invention comprises a two or three nucleotide overhang, wherein the nucleotides in the overhang are same or different. In one embodiment, the double stranded nucleic molecule (e.g. siNA) of the invention comprises a two or three nucleotide overhang, wherein the nucleotides ain the overhang are the same or different and wherein one or more nucleotides in the overhang are chemically modified at the base, sugar and/or phosphate backbone.

[0045] In one embodiment, the invention features one or more chemically-modified siNA constructs having specificity for HCV target nucleic acid molecules, such as DNA, or RNA encoding a protein or non-coding RNA associated with the expression of HCV target genes. In one embodiment, the invention features a RNA based siNA molecule (e.g., a siNA comprising 2′-OH nucleotides) having specificity for nucleic acid molecules that includes one or more chemical modifications described herein. Non-limiting examples of such chemical modifications include without limitation phosphorothioate internucleotide linkages, 2′-deoxyribonucleotides, 2′-O-methyl ribonucleotides, 2′-deoxy-2′-fluoro ribonucleotides, 4′-thio ribonucleotides, 2′-O-trifluoromethyl nucleotides, 2′-O-ethyl-trifluoromethoxy nucleotides, 2′-O-difluoromethoxy-ethoxy nucleotides (see for example U.S. Ser. No. 10/981,966 filed Nov. 5, 2004, incorporated by reference herein), “universal base” nucleotides, “acyclic” nucleotides, 5-C-methyl nucleotides, and terminal glyceryl and/or inverted deoxy abasic residue incorporation. These chemical modifications, when used in various siNA constructs, (e.g., RNA based siNA constructs), are shown to preserve RNAi activity in cells while at the same time, dramatically increasing the serum stability of these compounds. Furthermore, contrary to the data published by Parrish et al., supra, applicant demonstrates that multiple (greater than one) phosphorothioate substitutions are well-tolerated and confer substantial increases in serum stability for modified siNA constructs.

[0046] In one embodiment, a siNA molecule of the invention comprises modified nucleotides while maintaining the ability to mediate RNAi. The modified nucleotides can be used to improve in vitro or in vivo characteristics such as stability, activity, toxicity, immune response, and/or bioavailability. For example, a siNA molecule of the invention can comprise modified nucleotides as a percentage of the total number of nucleotides present in the siNA molecule. As such, a siNA molecule of the invention can generally comprise about 5% to about 100% modified nucleotides (e.g., about 5%, 10%, 15%, 20%, 25%, 30%, 35%, 40%, 45%, 50%, 55%, 60%, 65%, 70%, 75%, 80%, 85%, 90%, 95% or 100% modified nucleotides). For example, in one embodiment, between about 5% to about 100% (e.g., about 5%, 10%, 15%, 20%, 25%, 30%, 35%, 40%, 45%, 50%, 55%, 60%, 65%, 70%, 75%, 80%, 85%, 90%, 95% or 100% modified nucleotides) of the nucleotide positions in a siNA molecule of the invention comprise a nucleic acid sugar modification, such as a 2′-sugar modification, e.g., 2′-O-methyl nucleotides, 2′-deoxy-2′-fluoro nucleotides, 2′-O-methoxyethyl nucleotides, 2′-O-trifluoromethyl nucleotides, 2′-O-ethyl-trifluoromethoxy nucleotides, 2′-O-difluoromethoxy-ethoxy nucleotides, or 2′-deoxy nucleotides. In another embodiment, between about 5% to about 100% (e.g., about 5%, 10%, 15%, 20%, 25%, 30%, 35%, 40%, 45%, 50%, 55%, 60%, 65%, 70%, 75%, 80%, 85%, 90%, 95% or 100% modified nucleotides) of the nucleotide positions in a siNA molecule of the invention comprise a nucleic acid base modification, such as inosine, purine, pyridin-4-one, pyridin-2-one, phenyl, pseudouracil, 2,4,6-trimethoxy benzene, 3-methyl uracil, dihydrouridine, naphthyl, aminophenyl, 5-alkylcytidines (e.g., 5-methylcytidine), 5-alkyluridines (e.g., ribothymidine), 5-halouridine (e.g., 5-bromouridine) or 6-azapyrimidines or 6-alkylpyrimidines (e.g. 6-methyluridine), or propyne modifications. In another embodiment, between about 5% to about 100% (e.g., about 5%, 10%, 15%, 20%, 25%, 30%, 35%, 40%, 45%, 50%, 55%, 60%, 65%, 70%, 75%, 80%, 85%, 90%, 95% or 100% modified nucleotides) of the nucleotide positions in a siNA molecule of the invention comprise a nucleic acid backbone modification, such as a backbone modification having Formula I herein. In another embodiment, between about 5% to about 100% (e.g., about 5%, 10%, 15%, 20%, 25%,30%, 35%, 40%, 45%, 50%, 55%, 60%, 65%, 70%, 75%, 80%, 85%, 90%, 95% or 100% modified nucleotides) of the nucleotide positions in a siNA molecule of the invention comprise a nucleic acid sugar, base, or backbone modification or any combination thereof (e.g., any combination of nucleic acid sugar, base, backbone or non-nucleotide modifications herein). The actual percentage of modified nucleotides present in a given siNA molecule will depend on the total number of nucleotides present in the siNA. If the siNA molecule is single stranded, the percent modification can be based upon the total number of nucleotides present in the single stranded siNA molecules. Likewise, if the siNA molecule is double stranded, the percent modification can be based upon the total number of nucleotides present in the sense strand, antisense strand, or both the sense and antisense strands.

[0047] A siNA molecule of the invention can comprise modified nucleotides at various locations within the siNA molecule. In one embodiment, a double stranded siNA molecule of the.invention comprises modified nucleotides at internal base paired positions within the siNA duplex. For example, internal positions can comprise positions from about 3 to about 19 nucleotides from the 5′-end of either sense or antisense strand or region of a 21 nucleotide siNA duplex having 19 base pairs and two nucleotide 3′-overhangs. In another embodiment, a double stranded siNA molecule of the invention comprises modified nucleotides at non-base paired or overhang regions of the siNA molecule. By “non-base paired” is meant, the nucleotides are not base paired between the sense strand or sense region and the antisense strand or antisense region or the siNA molecule. The overhang nucleotides can be complementary or base paired to a corresponding HCV target polynucleotide sequence (see for example FIG. 6C). For example, overhang positions can comprise positions from about 20 to about 21 nucleotides from the 5′-end of either sense or antisense strand or region of a 21 nucleotide siNA duplex having 19 base pairs and two nucleotide 3′-overhangs. In another embodiment, a double stranded siNA molecule of the invention comprises modified nucleotides at terminal positions of the siNA molecule. For example, such terminal regions include the 3′-position, 5′-position, for both 3′and 5′-positions of the sense and/or antisense strand or region of the siNA molecule. In another embodiment, a double stranded siNA molecule of the invention comprises modified nucleotides at base-paired or internal positions, non-base paired or overhang regions, and/or terminal regions, or any combination thereof.

[0048] One aspect of the invention features a double-stranded short interfering nucleic acid (siNA) molecule that down-regulates expression of a HCV target gene or that directs cleavage of a HCV target RNA. In one embodiment, the double stranded siNA molecule comprises one or more chemical modifications and each strand of the double-stranded siNA is about 21 nucleotides long. In one embodiment, the double-stranded siNA molecule does not contain any ribonucleotides. In another embodiment, the double-stranded siNA molecule comprises one or more ribonucleotides. In one embodiment, each strand of the double-stranded siNA molecule independently comprises about 15 to about 30 (e.g., about 15, 16, 17, 18, 19, 20, 21, 22, 23, 24, 25, 26, 27, 28, 29, or 30) nucleotides, wherein each strand comprises about 15 to about 30 (e.g., about 15, 16, 17, 18, 19, 20, 21, 22, 23, 24, 25, 26, 27, 28, 29, or 30) nucleotides that are complementary to the nucleotides of the other strand. In one embodiment, one of the strands of the double-stranded siNA molecule comprises a nucleotide sequence that is complementary to a nucleotide sequence or a portion thereof of the HCV target gene, and the second strand of the double-stranded siNA molecule comprises a nucleotide sequence substantially similar to the nucleotide sequence of the HCV target gene or a portion thereof.

[0049] In another embodiment, the invention features a double-stranded short interfering nucleic acid (siNA) molecule that down-regulates expression of a HCV target gene or that directs cleavage of a HCV target RNA, comprising an antisense region, wherein the antisense region comprises a nucleotide sequence that is complementary to a nucleotide sequence of the HCV target gene or a portion thereof, and a sense region, wherein the sense region comprises a nucleotide sequence substantially similar to the nucleotide sequence of the HCV target gene or a portion thereof. In one embodiment, the antisense region and the sense region independently comprise about 15 to about 30 (e.g. about 15, 16, 17, 18, 19, 20, 21, 22, 23, 24, 25, 26, 27, 28, 29, or 30) nucleotides, wherein the antisense region comprises about 15 to about 30 (e.g. about 15, 16, 17, 18, 19, 20, 21, 22, 23, 24, 25, 26, 27, 28, 29, or 30) nucleotides that are complementary to nucleotides of the sense region.

[0050] In another embodiment, the invention features a double-stranded short interfering nucleic acid (siNA) molecule that down-regulates expression of a HCV target gene or that directs cleavage of a HCV target RNA, comprising a sense region and an antisense region, wherein the antisense region comprises a nucleotide sequence that is complementary to a nucleotide sequence of RNA encoded by the HCV target gene or a portion thereof and the sense region comprises a nucleotide sequence that is complementary to the antisense region.

[0051] In one embodiment, a siNA molecule of the invention comprises blunt ends, i.e., ends that do not include any overhanging nucleotides. For example, a siNA molecule comprising modifications described herein (e.g., comprising nucleotides having Formulae I-VII or siNA constructs comprising “Stab 00”-“Stab 34” or “Stab 3F”-“Stab 34F” (Table IV) or any combination thereof (see Table IV)) and/or any length described herein can comprise blunt ends or ends with no overhanging nucleotides.

[0052] In one embodiment, any siNA molecule of the invention can comprise one or more blunt ends, i.e. where a blunt end does not have any overhanging nucleotides. In one embodiment, the blunt ended siNA molecule has a number of base pairs equal to the number of nucleotides present in each strand of the siNA molecule. In another embodiment, the siNA molecule comprises one blunt end, for example wherein the 5′-end of the antisense strand and the 3′-end of the sense strand do not have any overhanging nucleotides. In another example, the siNA molecule comprises one blunt end, for example wherein the 3′-end of the antisense strand and the 5′-end of the sense strand do not have any overhanging nucleotides. In another example, a siNA molecule comprises two blunt ends, for example wherein the 3′-end of the antisense strand and the 5′-end of the sense strand as well as the 5′-end of the antisense strand and 3′-end of the sense strand do not have any overhanging nucleotides. A blunt ended siNA molecule can comprise, for example, from about 15 to about 30 nucleotides (e.g., about 15, 16, 17, 18, 19, 20, 21, 22, 23, 24, 25, 26, 27, 28, 29, or 30 nucleotides). Other nucleotides present in a blunt ended siNA molecule can comprise, for example, mismatches, bulges, loops, or wobble base pairs to modulate the activity of the siNA molecule to mediate RNA interference.

[0053] By “blunt ends” is meant symmetric termini or termini of a double stranded siNA molecule having no overhanging nucleotides. The two strands of a double stranded siNA molecule align with each other without over-hanging nucleotides at the termini. For example, a blunt ended siNA construct comprises terminal nucleotides that are complementary between the sense and antisense regions of the siNA molecule.

[0054] In one embodiment, the invention features a double-stranded short interfering nucleic acid (siNA) molecule that down-regulates expression of a HCV target gene or that directs cleavage of a HCV target RNA, wherein the siNA molecule is assembled from two separate oligonucleotide fragments wherein one fragment comprises the sense region and the second fragment comprises the antisense region of the siNA molecule. The sense region can be connected to the antisense region via a linker molecule, such as a polynucleotide linker or a non-nucleotide linker.

[0055] In one embodiment, a double stranded nucleic acid molecule (e.g., siNA) molecule of the invention comprises ribonucleotides at positions that maintain or enhance RNAi activity. In one embodiment, ribonucleotides are present in the sense strand or sense region of the siNA molecule, which can provide for RNAi activity by allowing cleavage of the sense strand or sense region by an enzyme within the RISC (e.g., ribonucleotides present at the position of passenger strand, sense strand or sense region cleavage, such as position 9 of the passenger strand of a 19 base-pair duplex is cleaved in the RISC by AGO2 enzyme, see for example Matranga et al., 2005, Cell, 123:1-114 and Rand et al., 2005, Cell, 123:621-629). In another embodiment, one or more (for example 1, 2, 3, 4 or 5) nucleotides at the 5′-end of the guide strand or guide region (also known as antisense strand or antisense region) of the siNA molecule are ribonucleotides.

[0056] In one embodiment, a double stranded nucleic acid molecule (e.g., siNA) molecule of the invention comprises one or more ribonucleotides at positions within the passenger strand or passenger region (also known as the sense strand or sense region) that allows cleavage of the passenger strand or passenger region by an enzyme in the RISC complex, (e.g., ribonucleotides present at the position of passenger strand such as position 9 of the passenger strand of a 19 base-pair duplex is cleaved in the RISC by AGO2 enzyme, see for example Matranga et al., 2005, Cell, 123:1-114 and Rand et al., 2005, Cell, 123:621-629).

[0057] In one embodiment, a siNA molecule of the invention contains at least 2, 3, 4, 5, or more chemical modifications that can be the same of different. In another embodiment, a siNA molecule of the invention contains at least 2, 3, 4, 5, or more different chemical modifications.

[0058] In one embodiment, a siNA molecule of the invention is a double-stranded short interfering nucleic acid (siNA), wherein the double stranded nucleic acid molecule comprises about 15 to about 30 (e.g. about 15, 16, 17, 18, 19, 20, 21, 22, 23, 24, 25, 26, 27, 28, 29, or 30) base pairs, and wherein one or more (e.g., at least 1, 2, 3, 4, 5, 6, 7, 8, 9, 10, 11, 12, 13, 14, 15, 16, 17, 18, 19, 20, 21, 22, 23, 24, 25, 26, 27, 28, 29, or 30) of the nucleotide positions in each strand of the siNA molecule comprises a chemical modification. In another embodiment, the siNA contains at least 2, 3, 4, 5, or more different chemical modifications.

[0059] In one embodiment, the invention features double-stranded short interfering nucleic acid (siNA) molecule that down-regulates expression of a HCV target gene or that directs cleavage of a HCV target RNA, wherein the siNA molecule comprises about 15 to about 30 (e.g. about 15, 16, 17, 18, 19, 20, 21, 22, 23, 24, 25, 26, 27, 28, 29, or 30) base pairs, and wherein each strand of the siNA molecule comprises one or more chemical modifications. In one embodiment, each strand of the double stranded siNA molecule comprises at least two (e.g., 2, 3, 4, 5, or more) different chemical modifications, e.g., different nucleotide sugar, base, or backbone modifications. In another embodiment, one of the strands of the double-stranded siNA molecule comprises a nucleotide sequence that is complementary to a nucleotide sequence of a HCV target gene or a portion thereof, and the second strand of the double-stranded siNA molecule comprises a nucleotide sequence substantially similar to the nucleotide sequence or a portion thereof of the HCV target gene. In another embodiment, one of the strands of the double-stranded siNA molecule comprises a nucleotide sequence that is complementary to a nucleotide sequence of a HCV target gene or portion thereof, and the second strand of the double-stranded siNA molecule comprises a nucleotide sequence substantially similar to the nucleotide sequence or portion thereof of the HCV target gene. In another embodiment, each strand of the siNA molecule comprises about 15 to about 30 (e.g. about 15, 16, 17, 18, 19, 20, 21, 22, 23, 24, 25, 26, 27, 28, 29, or 30) nucleotides, and each strand comprises at least about 15 to about 30 (e.g. about 15, 16, 17, 18, 19, 20, 21, 22, 23, 24, 25, 26, 27, 28, 29, or 30) nucleotides that are complementary to the nucleotides of the other strand. The HCV target gene can comprise, for example, sequences referred to herein or incorporated herein by reference. The HCV gene can comprise, for example, sequences referred to in Table I.

[0060] In one embodiment, each strand of a double stranded siNA molecule of the invention comprises a different pattern of chemical modifications, such as any “Stab 00”-“Stab 34” or “Stab 3F”-“Stab 34F” (Table IV) modification patterns herein or any combination thereof (see Table IV). Non-limiting examples of sense and antisense strands of such siNA molecules having various modification patterns are shown in Table III and FIGS. 4 and 5.

[0061] In one embodiment, a siNA molecule of the invention comprises no ribonucleotides. In another embodiment, a siNA molecule of the invention comprises ribonucleotides.

[0062] In one embodiment, a siNA molecule of the invention comprises an antisense region comprising a nucleotide sequence that is complementary to a nucleotide sequence of a HCV target gene or a portion thereof, and the siNA further comprises a sense region comprising a nucleotide sequence substantially similar to the nucleotide sequence of the HCV target gene or a portion thereof. In another embodiment, the antisense region and the sense region each comprise about 15 to about 30 (e.g. about 15, 16, 17, 18, 19, 20, 21, 22, 23, 24, 25, 26, 27, 28, 29, or 30) nucleotides and the antisense region comprises at least about 15 to about 30 (e.g. about 15, 16, 17, 18, 19, 20, 21, 22, 23, 24, 25, 26, 27, 28, 29, or 30) nucleotides that are complementary to nucleotides of the sense region. In one embodiment, each strand of the double stranded siNA molecule comprises at least two (e.g., 2, 3, 4, 5, or more) different chemical modifications, e.g., different nucleotide sugar, base, or backbone modifications. The HCV target gene can comprise, for example, sequences referred to herein or incorporated by reference herein. In another embodiment, the siNA is a double stranded nucleic acid molecule, Where each of the two strands of the siNA molecule independently comprise about 15 to about 40 (e.g. about 15, 16, 17, 18, 19, 20, 21, 22, 23, 24, 25, 26, 27, 28, 29, 30, 31, 23, 33, 34, 35, 36, 37, 38, 39, or 40) nucleotides, and where one of the strands of the siNA molecule comprises at least about 15 (e.g. about 15, 16, 17, 18, 19, 20, 21, 22, 23, 24 or 25 or more) nucleotides that are complementary to the nucleic acid sequence of the HCV target gene or a portion thereof.

[0063] In one embodiment, a siNA molecule of the invention comprises a sense region and an antisense region, wherein the antisense region comprises a nucleotide sequence that is complementary to a nucleotide sequence of RNA encoded by a HCV target gene, or a portion thereof, and the sense region comprises a nucleotide sequence that is complementary to the antisense region. In one embodiment, the siNA molecule is assembled from two separate oligonucleotide fragments, wherein one fragment comprises the sense region and the second fragment comprises the antisense region of the siNA molecule. In another embodiment, the sense region is connected to the antisense region via a linker molecule. In another embodiment, the sense region is connected to the antisense region via a linker molecule, such as a nucleotide or non-nucleotide linker. In one embodiment, each strand of the double stranded siNA molecule comprises at least two (e.g., 2, 3, 4, 5, or more) different chemical modifications, e.g., different nucleotide sugar, base, or backbone modifications. The HCV target gene can comprise, for example, sequences referred herein or incorporated by reference herein

[0064] In one embodiment, the invention features a double-stranded short interfering nucleic acid (siNA) molecule that down-regulates expression of a HCV target gene or that directs cleavage of a HCV target RNA, comprising a sense region and an antisense region, wherein the antisense region comprises a nucleotide sequence that is complementary to a nucleotide sequence of RNA encoded by the HCV target gene or a portion thereof and the sense region comprises a nucleotide sequence that is complementary to the antisense region, and wherein the siNA molecule has one or more modified pyrimidine and/or purine nucleotides. In one embodiment, each strand of the double stranded siNA molecule comprises at least two (e.g., 2, 3, 4, 5, or more) different chemical modifications, e.g., different nucleotide sugar, base, or backbone modifications. In one embodiment, the pyrimidine nucleotides in the sense region are 2′-O-methyl pyrimidine nucleotides or 2′-deoxy-2′-fluoro pyrimidine nucleotides and the purine nucleotides present in the sense region are 2′-deoxy purine nucleotides. In another embodiment, the pyrimidine nucleotides in the sense region are 2′-deoxy-2′-fluoro pyrimidine nucleotides and the purine nucleotides present in the sense region are 2′-O-methyl purine nucleotides. In another embodiment, the pyrimidine nucleotides in the sense region are 2′-deoxy-2′-fluoro pyrimidine nucleotides and the purine nucleotides present in the sense region are 2′-deoxy purine nucleotides. In one embodiment, the pyrimidine nucleotides in the antisense region are 2′-deoxy-2′-fluoro pyrimidine nucleotides and the purine nucleotides present in the antisense region are 2′-O-methyl or 2′-deoxy purine nucleotides. In another embodiment of any of the above-described siNA molecules, any nucleotides present in a non-complementary region of the sense strand (e.g. overhang region) are 2′-deoxy nucleotides.

[0065] In one embodiment, the invention features a double-stranded short interfering nucleic acid (siNA) molecule that down-regulates expression of a HCV target gene or that directs cleavage of a HCV target RNA, wherein the siNA molecule is assembled from two separate oligonucleotide fragments wherein one fragment comprises the sense region and the second fragment comprises the antisense region of the siNA molecule, and wherein the fragment comprising the sense region includes a terminal cap moiety at the 5′-end, the 3′-end, or both of the 5′and 3′ends of the fragment. In one embodiment, the terminal cap moiety is an inverted deoxy abasic moiety or glyceryl moiety. In one embodiment, each of the two fragments of the siNA molecule independently comprise about 15 to about 30 (e.g. about 15, 16, 17, 18, 19, 20, 21, 22, 23, 24, 25, 26, 27, 28, 29, or 30) nucleotides. In another embodiment, each of the two fragments of the siNA molecule independently comprise about 15 to about 40 (e.g. about 15, 16, 17, 18, 19, 20, 21, 22, 23, 24, 25, 26, 27, 28, 29, 30, 31, 23, 33, 34, 35, 36, 37, 38, 39, or 40) nucleotides. In a non-limiting example, each of the two fragments of the siNA molecule comprise about 21 nucleotides.

[0066] In one embodiment, the invention features a siNA molecule comprising at least one modified nucleotide, wherein the modified nucleotide is a 2′-deoxy-2′-fluoro nucleotide, 2′-O-trifluoromethyl nucleotide, 2′-O-ethyl-trifluoromethoxy nucleotide, or 2′-O-difluoromethoxy-ethoxy nucleotide or any other modified nucleoside/nucleotide described herein and in U.S. Ser. No. 10/981,966, filed Nov. 5, 2004, incorporated by reference herein. In one embodiment, the invention features a siNA molecule comprising at least two (e.g., 2, 3, 4, 5, 6, 7, 8, 9, 10, or more) modified nucleotides, wherein the modified nucleotide is selected from the group consisting of 2′-deoxy-2′-fluoro nucleotide, 2′-O-trifluoromethyl nucleotide, 2′-O-ethyl-trifluoromethoxy nucleotide, or 2′-O-difluoromethoxy-ethoxy nucleotide or any other modified nucleoside/nucleotide described herein and in U.S. Ser. No. 10/981,966, filed Nov. 5, 2004, incorporated by reference herein. The modified nucleotide/nucleoside can be the same or different. The siNA can be, for example, about 15 to about 40 nucleotides in length. In one embodiment, all pyrimidine nucleotides present in the siNA are 2′-deoxy-2′-fluoro, 2′-O-trifluoromethyl, 2′-O-ethyl-trifluoromethoxy, or 2′-O-difluoromethoxy-ethoxy, 4′-thio pyrimidine nucleotides. In one embodiment, the modified nucleotides in the siNA include at least one 2′-deoxy-2′-fluoro cytidine or 2′-deoxy-2′-fluoro uridine nucleotide. In another embodiment, the modified nucleotides in the siNA include at least one 2′-fluoro cytidine and at least one 2′-deoxy-2′-fluoro uridine nucleotides. In one embodiment, all uridine nucleotides present in the siNA are 2′-deoxy-2′-fluoro uridine nucleotides. In one embodiment, all cytidine nucleotides present in the siNA are 2′-deoxy-2′-fluoro cytidine nucleotides. In one embodiment, all adenosine nucleotides present in the siNA are 2′-deoxy-2′-fluoro adenosine nucleotides. In one embodiment, all guanosine nucleotides present in the siNA are 2′-deoxy-2′-fluoro guanosine nucleotides. The siNA can further comprise at least one modified internucleotidic linkage, such as phosphorothioate linkage. In one embodiment, the 2′-deoxy-2′-fluoronucleotides are present at specifically selected locations in the siNA that are sensitive to cleavage by ribonucleases, such as locations having pyrimidine nucleotides.

[0067] In one embodiment, the invention features a method of increasing the stability of a siNA molecule against cleavage by ribonucleases comprising introducing at least one modified nucleotide into the siNA molecule, wherein the modified nucleotide is a 2′-deoxy-2′-fluoro nucleotide. In one embodiment, all pyrimidine nucleotides present in the siNA are 2′-deoxy-2′-fluoro pyrimidine nucleotides. In one embodiment, the modified nucleotides in the siNA include at least one 2′-deoxy-2′-fluoro cytidine or 2′-deoxy-2′-fluoro uridine nucleotide. In another embodiment, the modified nucleotides in the siNA include at least one 2′-fluoro cytidine and at least one 2′-deoxy-2′-fluoro uridine nucleotides. In one embodiment, all uridine nucleotides present in the siNA are 2′-deoxy-2′-fluoro uridine nucleotides. In one embodiment, all cytidine nucleotides present in the siNA are 2′-deoxy-2′-fluoro cytidine nucleotides. In one embodiment, all adenosine nucleotides present in the siNA are 2′-deoxy-2′-fluoro adenosine nucleotides. In one embodiment, all guanosine nucleotides present in the siNA are 2′-deoxy-2′-fluoro guanosine nucleotides. The siNA can further comprise at least one modified internucleotidic linkage, such as a phosphorothioate linkage. In one embodiment, the 2′-deoxy-2′-fluoronucleotides are present at specifically selected locations in the siNA that are sensitive to cleavage by ribonucleases, such as locations having pyrimidine nucleotides.

[0068] In one embodiment, the invention features a double-stranded short interfering nucleic acid (siNA) molecule that down-regulates expression of a HCV target gene or that directs cleavage of a HCV target RNA, comprising a sense region and an antisense region, wherein the antisense region comprises a nucleotide sequence that is complementary to a nucleotide sequence of RNA encoded by the HCV target gene or a portion thereof and the sense region comprises a nucleotide sequence that is complementary to the antisense region, and wherein the purine nucleotides present in the antisense region comprise 2′-deoxy- purine nucleotides. In an alternative embodiment, the purine nucleotides present in the antisense region comprise 2′-O-methyl purine nucleotides. In either of the above embodiments, the antisense region can comprise a phosphorothioate internucleotide linkage at the 3′ end of the antisense region. Alternatively, in either of the above embodiments, the antisense region can comprise a glyceryl modification at the 3′ end of the antisense region. In another embodiment of any of the above-described siNA molecules, any nucleotides present in a non-complementary region of the antisense strand (e.g. overhang region) are 2′-deoxy nucleotides.

[0069] In one embodiment, the antisense region of a siNA molecule of the invention comprises sequence complementary to a portion of an endogenous transcript having sequence unique to a particular disease or trait related allele in a subject or organism, such as sequence comprising a single nucleotide polymorphism (SNP) associated with the disease or trait specific allele. As such, the antisense region of a siNA molecule of the invention can comprise sequence complementary to sequences that are unique to a particular allele to provide specificity in mediating selective RNAi against the disease, condition, or trait related allele.

[0070] In one embodiment, the invention features a double-stranded short interfering nucleic acid (siNA) molecule that down-regulates expression of a HCV target gene or that directs cleavage of a HCV target RNA, wherein the siNA molecule is assembled from two separate oligonucleotide fragments wherein one fragment comprises the sense region and the second fragment comprises the antisense region of the siNA molecule. In one embodiment, each strand of the double stranded siNA molecule is about 21 nucleotides long where about 19 nucleotides of each fragment of the siNA molecule are base-paired to the complementary nucleotides of the other fragment of the siNA molecule, wherein at least two 3′ terminal nucleotides of each fragment of the siNA molecule are not base-paired to the nucleotides of the other fragment of the siNA molecule. In another embodiment, the siNA molecule is a double stranded nucleic acid molecule, where each strand is about 19 nucleotide long and where the nucleotides of each fragment of the siNA molecule are base-paired to the complementary nucleotides of the other fragment of the siNA molecule to form at least about 15 (e.g., 15, 16, 17, 18, or 19) base pairs, wherein one or both ends of the siNA molecule are blunt ends. In one embodiment, each of the two 3′ terminal nucleotides of each fragment of the siNA molecule is a 2′-deoxy-pyrimidine nucleotide, such as a 2′-deoxy-thymidine. In another embodiment, all nucleotides of each fragment of the siNA molecule are base-paired to the complementary nucleotides of the other fragment of the siNA molecule. In another embodiment, the siNA molecule is a double stranded nucleic acid molecule of about 19 to about 25 base pairs having a sense region and an antisense region, where about 19 nucleotides of the antisense region are base-paired to the nucleotide sequence or a portion thereof of the RNA encoded by the HCV target gene. In another embodiment, about 21 nucleotides of the antisense region are base-paired to the nucleotide sequence or a portion thereof of the RNA encoded by the HCV target gene. In any of the above embodiments, the 5′-end of the fragment comprising said antisense region can optionally include a phosphate group.

[0071] In one embodiment, the invention features a double-stranded short interfering nucleic acid (siNA) molecule that inhibits the expression of a HCV target RNA sequence, wherein the siNA molecule does not contain any ribonucleotides and wherein each strand of the double-stranded siNA molecule is about 15 to about 30 nucleotides. In one embodiment, the siNA molecule is 21 nucleotides in length. Examples of non-ribonucleotide containing siNA constructs are combinations of stabilization chemistries shown in Table IV in any combination of Sense/Antisense chemistries, such as Stab 7/8, Stab 7/11, Stab 8/8, Stab 18/8, Stab 18/11, Stab 12/13, Stab 7/13, Stab 18/13, Stab 7/19, Stab 8/19, Stab 18/19, Stab 7/20, Stab 8/20, Stab 18/20, Stab 7/32, Stab 8/32, or Stab 18/32 (e.g., any siNA having Stab 7, 8, 11, 12, 13, 14, 15, 17, 18, 19, 20, or 32 sense or antisense strands or any combination thereof). Herein, numeric Stab chemistries can include both 2′-fluoro and 2′-OCF3 versions of the chemistries shown in Table IV. For example, “Stab 7/8” refers to both Stab 7/8 and Stab 7F/8F etc. In one embodiment, the invention features a chemically synthesized double stranded RNA molecule that directs cleavage of a HCV target RNA via RNA interference, wherein each strand of said RNA molecule is about 15 to about 30 nucleotides in length; one strand of the RNA molecule comprises nucleotide sequence having sufficient complementarity to the HCV target RNA for the RNA molecule to direct cleavage of the HCV target RNA via RNA interference; and wherein at least one strand of the RNA molecule optionally comprises one or more chemically modified nucleotides described herein, such as without limitation deoxynucleotides, 2′-O-methyl nucleotides, 2′-deoxy-2′-fluoro nucleotides, 2′-O-methoxyethyl nucleotides, 4′-thio nucleotides, 2′-O-trifluoromethyl nucleotides, 2′-O-ethyl-trifluoromethoxy nucleotides, 2′-O-difluoromethoxy-ethoxy nucleotides, etc.

[0072] In one embodiment, a HCV target RNA of the invention comprises sequence encoding a protein.

[0073] In one embodiment, HCV target RNA of the invention comprises non-coding RNA sequence (e.g., miRNA, snRNA, siRNA etc.), see for example Mattick, 2005, Science, 309, 1527-1528 and Claverie, 2005, Science, 309, 1529-1530.

[0074] In one embodiment, the invention features a medicament comprising a siNA molecule of the invention.

[0075] In one embodiment, the invention features an active ingredient comprising a siNA molecule of the invention.

[0076] In one embodiment, the invention features the use of a double-stranded short interfering nucleic acid (siNA) molecule to inhibit, down-regulate, or reduce expression of a HCV target gene, wherein the siNA molecule comprises one or more chemical modifications and each strand of the double-stranded siNA is independently about 15 to about 30 or more (e.g., about 15, 16, 17, 18, 19, 20, 21, 22, 23, 24, 25, 26, 27, 28, 29 or 30 or more) nucleotides long. In one embodiment, the siNA molecule of the invention is a double stranded nucleic acid molecule comprising one or more chemical modifications, where each of the two fragments of the siNA molecule independently comprise about 15 to about 40 (e.g. about 15, 16, 17, 18, 19, 20, 21, 22, 23, 24, 25, 26, 27, 28, 29, 30, 31, 23, 33, 34, 35, 36, 37, 38, 39, or 40) nucleotides and where one of the strands comprises at least 15 nucleotides that are complementary to nucleotide sequence of HCV target encoding RNA or a portion thereof. In a non-limiting example, each of the two fragments of the siNA molecule comprise about 21 nucleotides. In another embodiment, the siNA molecule is a double stranded nucleic acid molecule comprising one or more chemical modifications, where each strand is about 21 nucleotide long and where about 19 nucleotides of each fragment of the siNA molecule are base-paired to the complementary nucleotides of the other fragment of the siNA molecule, wherein at least two 3′ terminal nucleotides of each fragment of the siNA molecule are not base-paired to the nucleotides of the other fragment of the siNA molecule. In another embodiment, the siNA molecule is a double stranded nucleic acid molecule comprising one or more chemical modifications, where each strand is about 19 nucleotide long and where the nucleotides of each fragment of the siNA molecule are base-paired to the complementary nucleotides of the other fragment of the siNA molecule to form at least about 15 (e.g., 15, 16, 17, 18, or 19) base pairs, wherein one or both ends of the siNA molecule are blunt ends. In one embodiment, each of the two 3′ terminal nucleotides of each fragment of the siNA molecule is a 2′-deoxy-pyrimidine nucleotide, such as a 2′-deoxy-thymidine. In another embodiment, all nucleotides of each fragment of the siNA molecule are base-paired to the complementary nucleotides of the other fragment of the siNA molecule. In another embodiment, the siNA molecule is a double stranded nucleic acid molecule of about 19 to about 25 base pairs having a sense region and an antisense region and comprising one or more chemical modifications, where about 19 nucleotides of the antisense region are base-paired to the nucleotide sequence or a portion thereof of the RNA encoded by the HCV target gene. In another embodiment, about 21 nucleotides of the antisense region are base-paired to the nucleotide sequence or a portion thereof of the RNA encoded by the HCV target gene. In any of the above embodiments, the 5′-end of the fragment comprising said antisense region can optionally include a phosphate group.

[0077] In one embodiment, the invention features the use of a double-stranded short interfering nucleic acid (siNA) molecule that inhibits, down-regulates, or reduces expression of a HCV target gene, wherein one of the strands of the double-stranded siNA molecule is an antisense strand which comprises nucleotide sequence that is complementary to nucleotide sequence of HCV target RNA or a portion thereof, the other strand is a sense strand which comprises nucleotide sequence that is complementary to a nucleotide sequence of the antisense strand. In one embodiment, each strand has at least two (e.g., 2, 3, 4, 5, or more) chemical modifications, which can be the same or different, such as nucleotide, sugar, base, or backbone modifications. In one embodiment, a majority of the pyrimidine nucleotides present in the double-stranded siNA molecule comprises a sugar modification. In one embodiment, a majority of the purine nucleotides present in the double-stranded siNA molecule comprises a sugar modification.

[0078] In one embodiment, the invention features a double-stranded short interfering nucleic acid (siNA) molecule that inhibits, down-regulates, or reduces expression of a HCV target gene, wherein one of the strands of the double-stranded siNA molecule is an antisense strand which comprises nucleotide sequence that is complementary to nucleotide sequence of HCV target RNA or a portion thereof, wherein the other strand is a sense strand which comprises nucleotide sequence that is complementary to a nucleotide sequence of the antisense strand. In one embodiment, each strand has at least two (e.g., 2, 3, 4, 5, or more) chemical modifications, which can be the same or different, such as nucleotide, sugar, base, or backbone modifications. In one embodiment, a majority of the pyrimidine nucleotides present in the double-stranded siNA molecule comprises a sugar modification. In one embodiment, a majority of the purine nucleotides present in the double-stranded siNA molecule comprises a sugar modification.

[0079] In one embodiment, the invention features a double-stranded short interfering nucleic acid (siNA) molecule that inhibits, down-regulates, or reduces expression of a HCV target gene, wherein one of the strands of the double-stranded siNA molecule is an antisense strand which comprises nucleotide sequence that is complementary to nucleotide sequence of HCV target RNA that encodes a protein or portion thereof, the other strand is a sense strand which comprises nucleotide sequence that is complementary to a nucleotide sequence of the antisense strand and wherein a majority of the pyrimidine nucleotides present in the double-stranded siNA molecule comprises a sugar modification. In one embodiment, each strand of the siNA molecule comprises about 15 to about 30 or more (e.g., about 15, 16, 17, 18, 19, 20, 21, 22, 23, 24, 25, 26, 27, 28, 29, or 30 or more) nucleotides, wherein each strand comprises at least about 15 nucleotides that are complementary to the nucleotides of the other strand. In one embodiment, the siNA molecule is assembled from two oligonucleotide fragments, wherein one fragment comprises the nucleotide sequence of the antisense strand of the siNA molecule and a second fragment comprises nucleotide sequence of the sense region of the siNA molecule. In one embodiment, the sense strand is connected to the antisense strand via a linker molecule, such as a polynucleotide linker or a non-nucleotide linker. In a further embodiment, the pyrimidine nucleotides present in the sense strand are 2′-deoxy-2′fluoro pyrimidine nucleotides and the purine nucleotides present in the sense region are 2′-deoxy purine nucleotides. In another embodiment, the pyrimidine nucleotides present in the sense strand are 2′-deoxy-2′fluoro pyrimidine nucleotides and the purine nucleotides present in the sense region are 2′-O-methyl purine nucleotides. In still another embodiment, the pyrimidine nucleotides present in the antisense strand are 2′-deoxy-2′-fluoro pyrimidine nucleotides and any purine nucleotides present in the antisense strand are 2′-deoxy purine nucleotides. In another embodiment, the antisense strand comprises one or more 2′-deoxy-2′-fluoro pyrimidine nucleotides and one or more 2′-O-methyl purine nucleotides. In another embodiment, the pyrimidine nucleotides present in the antisense strand are 2′-deoxy-2′-fluoro pyrimidine nucleotides and any purine nucleotides present in the antisense strand are 2′-O-methyl purine nucleotides. In a further embodiment the sense strand comprises a 3′-end and a 5′-end, wherein a terminal cap moiety (e.g., an inverted deoxy abasic moiety or inverted deoxy nucleotide moiety such as inverted thymidine) is present at the 5′-end, the 3′-end, or both of the 5′ and 3′ ends of the sense strand. In another embodiment, the antisense strand comprises a phosphorothioate internucleotide linkage at the 3′ end of the antisense strand. In another embodiment, the antisense strand comprises a glyceryl modification at the 3′ end. In another embodiment, the 5′-end of the antisense strand optionally includes a phosphate group.

[0080] In any of the above-described embodiments of a double-stranded short interfering nucleic acid (siNA) molecule that inhibits expression of a HCV target gene, wherein a majority of the pyrimidine nucleotides present in the double-stranded siNA molecule comprises a sugar modification, each of the two strands of the siNA molecule can comprise about 15 to about 30 or more (e.g., about 15, 16, 17, 18, 19, 20, 21, 22, 23, 24, 25, 26, 27, 28, 29, or 30 or more) nucleotides. In one embodiment, about 15 to about 30 or more (e.g., about 15, 16, 17, 18, 19, 20, 21, 22, 23, 24, 25, 26, 27, 28, 29, or 30 or more) nucleotides of each strand of the siNA molecule are base-paired to the complementary nucleotides of the other strand of the siNA molecule. In another embodiment, about 15 to about 30 or more (e.g., about 15, 16, 17, 18, 19, 20, 21, 22, 23, 24, 25, 26, 27, 28, 29, or 30 or more) nucleotides of each strand of the siNA molecule are base-paired to the complementary nucleotides of the other strand of the siNA molecule, wherein at least two 3′ terminal nucleotides of each strand of the siNA molecule are not base-paired to the nucleotides of the other strand of the siNA molecule. In another embodiment, each of the two 3′ terminal nucleotides of each fragment of the siNA molecule is a 2′-deoxy-pyrimidine, such as 2′-deoxy-thymidine. In one embodiment, each strand of the siNA molecule is base-paired to the complementary nucleotides of the other strand of the siNA molecule. In one embodiment, about 15 to about 30 (e.g., about 15, 16, 17, 18, 19, 20, 21, 22, 23, 24, 25, 26, 27, 28, 29, or 30) nucleotides of the antisense strand are base-paired to the nucleotide sequence of the HCV target RNA or a portion thereof. In one embodiment, about 18 to about 25 (e.g., about 18, 19, 20, 21, 22, 23, 24, or 25) nucleotides of the antisense strand are base-paired to the nucleotide sequence of the HCV target RNA or a portion thereof.

[0081] In one embodiment, the invention features a double-stranded short interfering nucleic acid (siNA) molecule that inhibits expression of a HCV target gene, wherein one of the strands of the double-stranded siNA molecule is an antisense strand which comprises nucleotide sequence that is complementary to nucleotide sequence of HCV target RNA or a portion thereof, the other strand is a sense strand which comprises nucleotide sequence that is complementary to a nucleotide sequence of the antisense strand. In one embodiment, each strand has at least two (e.g., 2, 3, 4, 5, or more) different chemical modifications, such as nucleotide sugar, base, or backbone modifications. In one embodiment, a majority of the pyrimidine nucleotides present in the double-stranded siNA molecule comprises a sugar modification. In one embodiment, a majority of the purine nucleotides present in the double-stranded siNA molecule comprises a sugar modification. In one embodiment, the 5′-end of the antisense strand optionally includes a phosphate group.

[0082] In one embodiment, the invention features a double-stranded short interfering nucleic acid (siNA) molecule that inhibits expression of a HCV target gene, wherein one of the strands of the double-stranded siNA molecule is an antisense strand which comprises nucleotide sequence that is complementary to nucleotide sequence of HCV target RNA or a portion thereof, the other strand is a sense strand which comprises nucleotide sequence that is complementary to a nucleotide sequence of the antisense strand and wherein a majority of the pyrimidine nucleotides present in the double-stranded siNA molecule comprises a sugar modification, and wherein the nucleotide sequence or a portion thereof of the antisense strand is complementary to a nucleotide sequence of the untranslated region or a portion thereof of the HCV target RNA.

[0083] In one embodiment, the invention features a double-stranded short interfering nucleic acid (siNA) molecule that inhibits expression of a HCV target gene, wherein one of the strands of the double-stranded siNA molecule is an antisense strand which comprises nucleotide sequence that is complementary to nucleotide sequence of HCV target RNA or a portion thereof, wherein the other strand is a sense strand which comprises nucleotide sequence that is complementary to a nucleotide sequence of the antisense strand, wherein a majority of the pyrimidine nucleotides present in the double-stranded siNA molecule comprises a sugar modification, and wherein the nucleotide sequence of the antisense strand is complementary to a nucleotide sequence of the HCV target RNA or a portion thereof that is present in the HCV target RNA.

[0084] In one embodiment, the invention features a composition comprising a siNA molecule of the invention in a pharmaceutically acceptable carrier or diluent. In another embodiment, the invention features two or more differing siNA molecules of the invention (e.g. siNA molecules that target different regions of HCV target RNA or siNA molecules that target HCV RNA and cellular targets) in a pharmaceutically acceptable carrier or diluent.

[0085] In a non-limiting example, the introduction of chemically-modified nucleotides into nucleic acid molecules provides a powerful tool in overcoming potential limitations of in vivo stability and bioavailability inherent to native RNA molecules that are delivered exogenously. For example, the use of chemically-modified nucleic acid molecules can enable a lower dose of a particular nucleic acid molecule for a given therapeutic effect since chemically-modified nucleic acid molecules tend to have a longer half-life in serum. Furthermore, certain chemical modifications can improve the bioavailability of nucleic acid molecules by HCV targeting particular cells or tissues and/or improving cellular uptake of the nucleic acid molecule. Therefore, even if the activity of a chemically-modified nucleic acid molecule is reduced as compared to a native nucleic acid molecule, for example, when compared to an all-RNA nucleic acid molecule, the overall activity of the modified nucleic acid molecule can be greater than that of the native molecule due to improved stability and/or delivery of the molecule. Unlike native unmodified siNA, chemically-modified siNA can also minimize the possibility of activating interferon activity or immunostimulation in humans.

[0086] In any of the embodiments of siNA molecules described herein, the antisense region of a siNA molecule of the invention can comprise a phosphorothioate internucleotide linkage at the 3′-end of said antisense region. In any of the embodiments of siNA molecules described herein, the antisense region can comprise about one to about five phosphorothioate internucleotide linkages at the 5′-end of said antisense region. In any of the embodiments of siNA molecules described herein, the 3′-terminal nucleotide overhangs of a siNA molecule of the invention can comprise ribonucleotides or deoxyribonucleotides that are chemically-modified at a nucleic acid sugar, base, or backbone. In any of the embodiments of siNA molecules described herein, the 3′-terminal nucleotide overhangs can comprise one or more universal base ribonucleotides. In any of the embodiments of siNA molecules described herein, the 3′-terminal nucleotide overhangs can comprise one or more acyclic nucleotides.

[0087] One embodiment of the invention provides an expression vector comprising a nucleic acid sequence encoding at least one siNA molecule of the invention in a manner that allows expression of the nucleic acid molecule. Another embodiment of the invention provides a mammalian cell comprising such an expression vector. The mammalian cell can be a human cell. The siNA molecule of the expression vector can comprise a sense region and an antisense region. The antisense region can comprise sequence complementary to a RNA or DNA sequence encoding a HCV target and the sense region can comprise sequence complementary to the antisense region. The siNA molecule can comprise two distinct strands having complementary sense and antisense regions. The siNA molecule can comprise a single strand having complementary sense and antisense regions.

[0088] In one embodiment, the invention features a chemically-modified short interfering nucleic acid (siNA) molecule capable of mediating RNA interference (RNAi) inside a cell or reconstituted in vitro system, wherein the chemical modification comprises one or more (e.g., about 1, 2, 3, 4, 5, 6, 7, 8, 9, 10, or more) nucleotides comprising a backbone modified internucleotide linkage having Formula I:

[chemical structure]

[0089] wherein each R1 and R2 is independently any nucleotide, non-nucleotide, or polynucleotide which can be naturally-occurring or chemically-modified and which can be included in the structure of the siNA molecule or serve as a point of attachment to the siNA molecule, each X and Y is independently O, S, N, alkyl, or substituted alkyl, each Z and W is independently O, S, N, alkyl, substituted alkyl, O-alkyl, S-alkyl, alkaryl, aralkyl, or acetyl and wherein W, X, Y, and Z are optionally not all O. In another embodiment, a backbone modification of the invention comprises a phosphonoacetate and/or thiophosphonoacetate internucleotide linkage (see for example Sheehan et al., 2003, Nucleic Acids Research, 31, 4109-4118).

[0090] The chemically-modified internucleotide linkages having Formula I, for example, wherein any Z, W, X, and/or Y independently comprises a sulphur atom, can be present in one or both oligonucleotide strands of the siNA duplex, for example, in the sense strand, the antisense strand, or both strands. The siNA molecules of the invention can comprise one or more (e.g., about 1, 2, 3, 4, 5, 6, 7, 8, 9, 10, or more) chemically-modified internucleotide linkages having Formula I at the 3′-end, the 5′-end, or both of the 3′and 5′-ends of the sense strand, the antisense strand, or both strands. For example, an exemplary siNA molecule of the invention can comprise about 1 to about 5 or more (e.g., about 1, 2, 3, 4, 5, or more) chemically-modified internucleotide linkages having Formula I at the 5′-end of the sense strand, the antisense strand, or both strands. In another non-limiting example, an exemplary siNA molecule of the invention can comprise one or more (e.g., about 1, 2, 3, 4, 5, 6, 7, 8, 9, 10, or more) pyrimidine nucleotides with chemically-modified internucleotide linkages having Formula I in the sense strand, the antisense strand, or both strands. In yet another non-limiting example, an exemplary siNA molecule of the invention can comprise one or more (e.g., about 1, 2, 3, 4, 5, 6, 7, 8, 9, 10, or more) purine nucleotides with chemically-modified internucleotide linkages having Formula I in the sense strand, the antisense strand, or both strands. In another embodiment, a siNA molecule of the invention having internucleotide linkage(s) of Formula I also comprises a chemically-modified nucleotide or non-nucleotide having any of Formulae I-VII.

[0091] In one embodiment, the invention features a chemically-modified short interfering nucleic acid (siNA) molecule capable of mediating RNA interference (RNAi) inside a cell or reconstituted in vitro system, wherein the chemical modification comprises one or more (e.g., about 1, 2, 3, 4, 5, 6, 7, 8, 9, 10, or more) nucleotides or non-nucleotides having Formula II:

[chemical structure]

[0092] wherein each R3, R4, R5, R6, R7, R8, R10, R11 and R12 is independently H, OH, alkyl, substituted alkyl, alkaryl or aralkyl, F, Cl, Br, CN, CF3, OCF3, OCN, O-alkyl, S-alkyl, N-alkyl, O-alkenyl, S-alkenyl, N-alkenyl, SO-alkyl, alkyl-OSH, alkyl-OH, O-alkyl-OH, O-alkyl-SH, S-alkyl-OH, S-alkyl-SH, alkyl-S-alkyl, alkyl-O-alkyl, ONO2, NO2, N3, NH2, aminoalkyl, aminoacid, aminoacyl, ONH2, O-aminoalkyl, O-aminoacid, O-aminoacyl, heterocycloalkyl, heterocycloalkaryl, aminoalkylamino, polyalklylamino, substituted silyl, or a group having any of Formula I, II, III, IV, V, VI and/or VII, any of which can be included in the structure of the siNA molecule or serve as a point of attachment to the siNA molecule; R9 is O, S, CH2, S═O, CHF, or CF2, and B is a nucleosidic base such as adenine, guanine, uracil, cytosine, thymine, 2-aminoadenosine, 5-methylcytosine, 2,6-diaminopurine, or any other non-naturally occurring base that can be complementary or non-complementary to target RNA or a non-nucleosidic base such as phenyl, naphthyl, 3-nitropyrrole, 5-nitroindole, nebularine, pyridone, pyridinone, or any other non-naturally occurring universal base that can be complementary or non-complementary to target RNA. In one embodiment, R3 and/or R7 comprises a conjugate moiety and a linker (e.g., a nucleotide or non-nucleotide linker as described herein or otherwise known in the art). Non-limiting examples of conjugate moieties include ligands for cellular receptors, such as peptides derived from naturally occurring protein ligands; protein localization sequences, including cellular ZIP code sequences; antibodies; nucleic acid aptamers; vitamins and other co-factors, such as folate and N-acetylgalactosamine; polymers, such as polyethyleneglycol (PEG); phospholipids; cholesterol; steroids, and polyamines, such as PEI, spermine or spermidine.

[0093] The chemically-modified nucleotide or non-nucleotide of Formula II can be present in one or both oligonucleotide strands of the siNA duplex, for example in the sense strand, the antisense strand, or both strands. The siNA molecules of the invention can comprise one or more chemically-modified nucleotides or non-nucleotides of Formula II at the 3′-end, the 5′-end, or both of the 3′ and 5′-ends of the sense strand, the antisense strand, or both strands. For example, an exemplary siNA molecule of the invention can comprise about 1 to about 5 or more (e.g., about 1, 2, 3, 4, 5, or more) chemically-modified nucleotides or non-nucleotides of Formula II at the 5′-end of the sense strand, the antisense strand, or both strands. In anther non-limiting example, an exemplary siNA molecule of the invention can comprise about 1 to about 5 or more (e.g., about 1, 2, 3, 4, 5, or more) chemically-modified nucleotides or non-nucleotides of Formula II at the 3′-end of the sense strand, the antisense strand, or both strands.

[0094] In one embodiment, the invention features a chemically-modified short interfering nucleic acid (siNA) molecule capable of mediating RNA interference (RNAi) inside a cell or reconstituted in vitro system, wherein the chemical modification comprises one or more (e.g., about 1, 2, 3, 4, 5, 6, 7, 8, 9, 10, or more) nucleotides or non-nucleotides having Formula III: [chemical structure]
wherein each R3, R4, R5, R6, R7, R8, R10, R11 and R12 is independently H, OH, alkyl, substituted alkyl, alkaryl or aralkyl, F, Cl, Br, CN, CF3, OCF3, OCN, O-alkyl, S-alkyl, N-alkyl, O-alkenyl, S-alkenyl, N-alkenyl, SO-alkyl, alkyl-OSH, alkyl-OH, O-alkyl-OH, O-alkyl-SH, S-alkyl-OH, S-alkyl-SH, alkyl-S-alkyl, alkyl-O-alkyl, ONO2, NO2, N3, NH2, aminoalkyl, aminoacid, aminoacyl, ONH2, O-aminoalkyl, O-aminoacid, O-aminoacyl, heterocycloalkyl, heterocycloalkaryl, aminoalkylamino, polyalklylamino, substituted silyl, or a group having any of Formula I, II, III, IV, V, VI and/or VII, any of which can be included in the structure of the siNA molecule or serve as a point of attachment to the siNA molecule; R9 is O, S, CH2, S═O, CHF, or CF2, and B is a nucleosidic base such as adenine, guanine, uracil, cytosine, thymine, 2-aminoadenosine, 5-methylcytosine, 2,6-diaminopurine, or any other non-naturally occurring base that can be employed to be complementary or non-complementary to target RNA or a non-nucleosidic base such as phenyl, naphthyl, 3-nitropyrrole, 5-nitroindole, nebularine, pyridone, pyridinone, or any other non-naturally occurring universal base that can be complementary or non-complementary to target RNA. In one embodiment, R3 and/or R7 comprises a conjugate moiety and a linker (e.g., a nucleotide or non-nucleotide linker as described herein or otherwise known in the art). Non-limiting examples of conjugate moieties include ligands for cellular receptors, such as peptides derived from naturally occurring protein ligands; protein localization sequences, including cellular ZIP code sequences; antibodies; nucleic acid aptamers; vitamins and other co-factors, such as folate and N-acetylgalactosamine; polymers, such as polyethyleneglycol (PEG); phospholipids; cholesterol; steroids, and polyamines, such as PEI, spermine or spermidine.

[0095] The chemically-modified nucleotide or non-nucleotide of Formula III can be present in one or both oligonucleotide strands of the siNA duplex, for example, in the sense strand, the antisense strand, or both strands. The siNA molecules of the invention can comprise one or more chemically-modified nucleotides or non-nucleotides of Formula III at the 3′-end, the 5′-end, or both of the 3′and 5′-ends of the sense strand, the antisense strand, or both strands. For example, an exemplary siNA molecule of the invention can comprise about 1 to about 5 or more (e.g., about 1, 2, 3, 4, 5, or more) chemically-modified nucleotide(s) or non-nucleotide(s) of Formula III at the 5′-end of the sense strand, the antisense strand, or both strands. In anther non-limiting example, an exemplary siNA molecule of the invention can comprise about 1 to about 5 or more (e.g., about 1, 2, 3, 4, 5, or more) chemically-modified nucleotide or non-nucleotide of Formula III at the 3′-end of the sense strand, the antisense strand, or both strands.

[0096] In another embodiment, a siNA molecule of the invention comprises a nucleotide having Formula II or III, wherein the nucleotide having Formula II or III is in an inverted configuration. For example, the nucleotide having Formula II or III is connected to the siNA construct in a 3′-3′, 3′-2′, 2′-3′, or 5′-5′ configuration, such as at the 3′-end, the 5′-end, or both of the 3′ and 5′-ends of one or both siNA strands.

[0097] In one embodiment, the invention features a chemically-modified short interfering nucleic acid (siNA) molecule capable of mediating RNA interference (RNAi) inside a cell or reconstituted in vitro system, wherein the chemical modification comprises a 5′-terminal phosphate group having Formula IV: [chemical structure]
wherein each X and Y is independently O, S, N, alkyl, substituted alkyl, or alkylhalo; wherein each Z and W is independently O, S, N, alkyl, substituted alkyl, O-alkyl, S-alkyl, alkaryl, aralkyl, alkylhalo, or acetyl; and wherein W, X, Y and Z are optionally not all O and Y serves as a point of attachment to the siNA molecule.

[0098] In one embodiment, the invention features a siNA molecule having a 5′-terminal phosphate group having Formula IV on the HCV target-complementary strand, for example, a strand complementary to a HCV target RNA, wherein the siNA molecule comprises an all RNA siNA molecule. In another embodiment, the invention features a siNA molecule having a 5′-terminal phosphate group having Formula IV on the HCV target-complementary strand wherein the siNA molecule also comprises about 1 to about 3 (e.g., about 1, 2, or 3) nucleotide 3′-terminal nucleotide overhangs having about 1 to about 4 (e.g., about 1, 2, 3, or 4) deoxyribonucleotides on the 3′-end of one or both strands. In another embodiment, a 5′-terminal phosphate group having Formula IV is present on the HCV target-complementary strand of a siNA molecule of the invention, for example a siNA molecule having chemical modifications having any of Formulae I-VII.

[0099] In one embodiment, the invention features a chemically-modified short interfering nucleic acid (siNA) molecule capable of mediating RNA interference (RNAi) inside a cell or reconstituted in vitro system, wherein the chemical modification comprises one or more phosphorothioate internucleotide linkages. For example, in a non-limiting example, the invention features a chemically-modified short interfering nucleic acid (siNA) having about 1, 2, 3, 4, 5, 6, 7, 8 or more phosphorothioate internucleotide linkages in one siNA strand. In yet another embodiment, the invention features a chemically-modified short interfering nucleic acid (siNA) individually having about 1, 2, 3, 4, 5, 6, 7, 8 or more phosphorothioate internucleotide linkages in both siNA strands. The phosphorothioate internucleotide linkages can be present in one or both oligonucleotide strands of the siNA duplex, for example in the sense strand, the antisense strand, or both strands. The siNA molecules of the invention can comprise one or more phosphorothioate internucleotide linkages at the 3′-end, the 5′-end, or both of the 3′- and 5′-ends of the sense strand, the antisense strand, or both strands. For example, an exemplary siNA molecule of the invention can comprise about 1 to about 5 or more (e.g., about 1, 2, 3, 4, 5, or more) consecutive phosphorothioate internucleotide linkages at the 5′-end of the sense strand, the antisense strand, or both strands. In another non-limiting example, an exemplary siNA molecule of the invention can comprise one or more (e.g., about 1, 2, 3, 4, 5, 6, 7, 8, 9, 10, or more) pyrimidine phosphorothioate internucleotide linkages in the sense strand, the antisense strand, or both strands. In yet another non-limiting example, an exemplary siNA molecule of the invention can comprise one or more (e.g., about 1, 2, 3, 4, 5, 6, 7, 8, 9, 10, or more) purine phosphorothioate internucleotide linkages in the sense strand, the antisense strand, or both strands.

[0100] Each strand of the double stranded siNA molecule can have one or more chemical modifications such that each strand comprises a different pattern of chemical modifications. Several non-limiting examples of modification schemes that could give rise to different patterns of modifications are provided herein.

[0101] In one embodiment, the invention features a siNA molecule, wherein the sense strand comprises one or more, for example, about 1, 2, 3, 4, 5, 6, 7, 8, 9, 10, or more phosphorothioate internucleotide linkages, and/or one or more (e.g., about 1, 2, 3, 4, 5, 6, 7, 8, 9, 10 or more) 2′-deoxy, 2′-O-methyl, 2′-deoxy-2′-fluoro, 2′-O-trifluoromethyl, 2′-O-ethyl-trifluoromethoxy, 2′-O-difluoromethoxy-ethoxy and/or about one or more (e.g., about 1, 2, 3, 4, 5, 6, 7, 8, 9, 10 or more) universal base modified nucleotides, and optionally a terminal cap molecule at the 3′-end, the 5′-end, or both of the 3′- and 5′-ends of the sense strand; and wherein the antisense strand comprises about 1 to about 10 or more, specifically about 1, 2, 3, 4, 5, 6, 7, 8, 9, 10, or more phosphorothioate internucleotide linkages, and/or one or more (e.g., about 1, 2, 3, 4, 5, 6, 7, 8, 9, 10 or more) 2′-deoxy, 2′-O-methyl, 2′-deoxy-2′-fluoro, 2′-O-trifluoromethyl, 2′-O-ethyl-trifluoromethoxy, 2′-O-difluoromethoxy-ethoxy, 4′-thio and/or one or more (e.g., about 1, 2, 3, 4, 5, 6, 7, 8, 9, 10 or more) universal base modified nucleotides, and optionally a terminal cap molecule at the 3′-end, the 5′-end, or both of the 3′- and 5′-ends of the antisense strand. In another embodiment, one or more, for example about 1, 2, 3, 4, 5, 6, 7, 8, 9, 10, or more, pyrimidine nucleotides of the sense and/or antisense siNA strand are chemically-modified with 2′-deoxy, 2′-O-methyl, 2′-O-trifluoromethyl, 2′-O-ethyl-trifluoromethoxy, 2′-O-difluoromethoxy-ethoxy, 4′-thio and/or 2′-deoxy-2′-fluoro nucleotides, with or without one or more, for example about 1, 2, 3, 4, 5, 6, 7, 8, 9, 10, or more, phosphorothioate internucleotide linkages and/or a terminal cap molecule at the 3′-end, the 5′-end, or both of the 3′- and 5′-ends, being present in the same or different strand.

[0102] In another embodiment, the invention features a siNA molecule, wherein the sense strand comprises about 1 to about 5, specifically about 1, 2, 3, 4, or 5 phosphorothioate internucleotide linkages, and/or one or more (e.g., about 1, 2, 3, 4, 5, or more) 2′-deoxy, 2′-O-methyl, 2′-deoxy-2′-fluoro, 2′-O-trifluoromethyl, 2′-O-ethyl-trifluoromethoxy, 2′-O-difluoromethoxy-ethoxy, 4′-thio and/or one or more (e.g., about 1, 2, 3, 4, 5, or more) universal base modified nucleotides, and optionally a terminal cap molecule at the 3-end, the 5′-end, or both of the 3′- and 5′-ends of the sense strand; and wherein the antisense strand comprises about 1 to about 5 or more, specifically about 1, 2, 3, 4, 5, or more phosphorothioate internucleotide linkages, and/or one or more (e.g., about 1, 2, 3, 4, 5, 6, 7, 8, 9, 10 or more) 2′-deoxy, 2′-O-methyl, 2′-deoxy-2′-fluoro, 2′-O-trifluoromethyl, 2′-O-ethyl-trifluoromethoxy, 2′-O-difluoromethoxy-ethoxy, 4′-thio and/or one or more (e.g., about 1, 2, 3, 4, 5, 6, 7, 8, 9, 10 or more) universal base modified nucleotides, and optionally a terminal cap molecule at the 3′-end, the 5′-end, or both of the 3′- and 5′-ends of the antisense strand. In another embodiment, one or more, for example about 1, 2, 3, 4, 5, 6, 7, 8, 9, 10, or more, pyrimidine nucleotides of the sense and/or antisense siNA strand are chemically-modified with 2′-deoxy, 2′-O-methyl, 2′-O-trifluoromethyl, 2′-O-ethyl-trifluoromethoxy, 2′-O-difluoromethoxy-ethoxy, 4′-thio and/or 2′-deoxy-2′-fluoro nucleotides, with or without about 1 to about 5 or more, for example about 1, 2, 3, 4, 5, or more phosphorothioate internucleotide linkages and/or a terminal cap molecule at the 3′-end, the 5′-end, or both of the 3′- and 5′-ends, being present in the same or different strand.

[0103] In one embodiment, the invention features a siNA molecule, wherein the antisense strand comprises one or more, for example, about 1, 2, 3, 4, 5, 6, 7, 8, 9, 10, or more phosphorothioate internucleotide linkages, and/or about one or more (e.g., about 1, 2, 3, 4, 5, 6, 7, 8, 9, 10 or more) 2′-deoxy, 2′-O-methyl, 2′-deoxy-2′-fluoro, 2′-O-trifluoromethyl, 2′-O-ethyl-trifluoromethoxy, 2′-O-difluoromethoxy-ethoxy, 4′-thio and/or one or more (e.g., about 1, 2, 3, 4, 5, 6, 7, 8, 9, 10 or more) universal base modified nucleotides, and optionally a terminal cap molecule at the 3′-end, the 5′-end, or both of the 3′- and 5′-ends of the sense strand; and wherein the antisense strand comprises about 1 to about 10 or more, specifically about 1, 2, 3, 4, 5, 6, 7, 8, 9, 10 or more phosphorothioate internucleotide linkages, and/or one or more (e.g., about 1, 2, 3, 4, 5, 6, 7, 8, 9, 10 or more) 2′-deoxy, 2′-O-methyl, 2′-deoxy-2′-fluoro, 2′-O-trifluoromethyl, 2′-O-ethyl-trifluoromethoxy, 2′-O-difluoromethoxy-ethoxy, 4′-thio and/or one or more (e.g., about 1, 2, 3, 4, 5, 6, 7, 8, 9, 10 or more) universal base modified nucleotides, and optionally a terminal cap molecule at the 3′-end, the 5′-end, or both of the 3′- and 5′-ends of the antisense strand. In another embodiment, one or more, for example about 1, 2, 3, 4, 5, 6, 7, 8, 9, 10 or more pyrimidine nucleotides of the sense and/or antisense siNA strand are chemically-modified with 2′-deoxy, 2′-O-methyl, 2′-O-trifluoromethyl, 2′-O-ethyl-trifluoromethoxy, 2′-O-difluoromethoxy-ethoxy, 4′-thio and/or 2′-deoxy-2′-fluoro nucleotides, with or without one or more, for example, about 1, 2, 3, 4, 5, 6, 7, 8, 9, 10 or more phosphorothioate internucleotide linkages and/or a terminal cap molecule at the 3′-end, the 5′-end, or both of the 3′and 5′-ends, being present in the same or different strand.

[0104] In another embodiment, the invention features a siNA molecule, wherein the antisense strand comprises about 1 to about 5 or more, specifically about 1, 2, 3, 4, 5 or more phosphorothioate internucleotide linkages, and/or one or more (e.g., about 1, 2, 3, 4, 5, 6, 7, 8, 9, 10 or more) 2′-deoxy, 2′-O-methyl, 2′-deoxy-2′-fluoro, 2′-O-trifluoromethyl, 2′-O-ethyl-trifluoromethoxy, 2′-O-difluoromethoxy-ethoxy, 4′-thio and/or one or more (e.g., about 1, 2, 3, 4, 5, 6, 7, 8, 9, 10 or more) universal base modified nucleotides, and optionally a terminal cap molecule at the 3′-end, the 5′-end, or both of the 3′- and 5′-ends of the sense strand; and wherein the antisense strand comprises about 1 to about 5 or more, specifically about 1, 2, 3, 4, 5 or more phosphorothioate internucleotide linkages, and/or one or more (e.g., about 1, 2, 3, 4, 5, 6, 7, 8, 9, 10 or more) 2′-deoxy, 2′-O-methyl, 2′-deoxy-2′-fluoro, 2′-O-trifluoromethyl, 2′-O-ethyl-trifluoromethoxy, 2′-O-difluoromethoxy-ethoxy, 4′-thio and/or one or more (e.g., about 1, 2, 3, 4, 5, 6, 7, 8, 9, 10 or more) universal base modified nucleotides, and optionally a terminal cap molecule at the 3′-end, the 5′-end, or both of the 3′- and 5′-ends of the antisense strand. In another embodiment, one or more, for example about 1, 2, 3, 4, 5, 6, 7, 8, 9, 10 or more pyrimidine nucleotides of the sense and/or antisense siNA strand are chemically-modified with 2′-deoxy, 2′-O-methyl, 2′-O-trifluoromethyl, 2′-O-ethyl-trifluoromethoxy, 2′-O-difluoromethoxy-ethoxy, 4′-thio and/or 2′-deoxy-2′-fluoro nucleotides, with or without about 1 to about 5, for example about 1, 2, 3, 4, 5 or more phosphorothioate internucleotide linkages and/or a terminal cap molecule at the 3′-end, the 5′-end, or both of the 3′- and 5′-ends, being present in the same or different strand.

[0105] In one embodiment, the invention features a chemically-modified short interfering nucleic acid (siNA) molecule having about 1 to about 5 or more (specifically about 1, 2, 3, 4, 5 or more) phosphorothioate internucleotide linkages in each strand of the siNA molecule.

[0106] In another embodiment, the invention features a siNA molecule comprising 2′-5′ internucleotide linkages. The 2′-5′ internucleotide linkage(s) can be at the 3′-end, the 5′-end, or both of the 3′- and 5′-ends of one or both siNA sequence strands. In addition, the 2′-5′ internucleotide linkage(s) can be present at various other positions within one or both siNA sequence strands, for example, about 1, 2, 3, 4, 5, 6, 7, 8, 9, 10, or more including every internucleotide linkage of a pyrimidine nucleotide in one or both strands of the siNA molecule can comprise a 2′-5′ internucleotide linkage, or about 1, 2, 3, 4, 5, 6, 7, 8, 9, 10, or more including every internucleotide linkage of a purine nucleotide in one or both strands of the siNA molecule can comprise a 2′-5′ internucleotide linkage.

[0107] In another embodiment, a chemically-modified siNA molecule of the invention comprises a duplex having two strands, one or both of which can be chemically-modified, wherein each strand is independently about 15 to about 30 (e.g., about 15, 16, 17, 18, 19, 20, 21, 22, 23, 24, 25, 26, 27, 28, 29, or 30) nucleotides in length, wherein the duplex has about 15 to about 30 (e.g., about 15, 16, 17, 18, 19, 20, 21, 22, 23, 24, 25, 26, 27, 28, 29, or 30) base pairs, and wherein the chemical modification comprises a structure having any of Formulae I-VII. For example, an exemplary chemically-modified siNA molecule of the invention comprises a duplex having two strands, one or both of which can be chemically-modified with a chemical modification having any of Formulae I-VII or any combination thereof, wherein each strand consists of about 21 nucleotides, each having a 2-nucleotide 3′-terminal nucleotide overhang, and wherein the duplex has about 19 base pairs. In another embodiment, a siNA molecule of the invention comprises a single stranded hairpin structure, wherein the siNA is about 36 to about 70 (e.g., about 36, 40, 45, 50, 55, 60, 65, or 70) nucleotides in length having about 15 to about 30 (e.g., about 15, 16, 17, 18, 19, 20, 21, 22, 23, 24, 25, 26, 27, 28, 29, or 30) base pairs, and wherein the siNA can include a chemical modification comprising a structure having any of Formulae I-VII or any combination thereof. For example, an exemplary chemically-modified siNA molecule of the invention comprises a linear oligonucleotide having about 42 to about 50 (e.g., about 42, 43, 44, 45, 46, 47, 48, 49, or 50) nucleotides that is chemically-modified with a chemical modification having any of Formulae I-VII or any combination thereof, wherein the linear oligonucleotide forms a hairpin structure having about 19 to about 21 (e.g., 19, 20, or 21) base pairs and a 2-nucleotide 3′-terminal nucleotide overhang. In another embodiment, a linear hairpin siNA molecule of the invention contains a stem loop motif, wherein the loop portion of the siNA molecule is biodegradable. For example, a linear hairpin siNA molecule of the invention is designed such that degradation of the loop portion of the siNA molecule in vivo can generate a double-stranded siNA molecule with 3′-terminal overhangs, such as 3′-terminal nucleotide overhangs comprising about 2 nucleotides.

[0108] In another embodiment, a siNA molecule of the invention comprises a hairpin structure, wherein the siNA is about 25 to about 50 (e.g., about 25, 26, 27, 28, 29, 30, 31, 32, 33, 34, 35, 36, 37, 38, 39, 40, 41, 42, 43, 44, 45, 46, 47, 48, 49, or 50) nucleotides in length having about 3 to about 25 (e.g., about 3, 4, 5, 6, 7, 8, 9, 10, 11, 12, 13, 14, 15, 16, 17, 18, 19, 20, 21, 22, 23, 24, or 25) base pairs, and wherein the siNA can include one or more chemical modifications comprising a structure having any of Formulae I-VII or any combination thereof. For example, an exemplary chemically-modified siNA molecule of the invention comprises a linear oligonucleotide having about 25 to about 35 (e.g., about 25, 26, 27, 28, 29, 30, 31, 32, 33, 34, or 35) nucleotides that is chemically-modified with one or more chemical modifications having any of Formulae I-VII or any combination thereof, wherein the linear oligonucleotide forms a hairpin structure having about 3 to about 25 (e.g., about 3, 4, 5, 6, 7, 8, 9, 10, 11, 12, 13, 14, 15, 16, 17, 18, 19, 20, 21, 22, 23, 24, or 25) base pairs and a 5′-terminal phosphate group that can be chemically modified as described herein (for example a 5′-terminal phosphate group having Formula IV). In another embodiment, a linear hairpin siNA molecule of the invention contains a stem loop motif, wherein the loop portion of the siNA molecule is biodegradable. In one₌embodiment, a linear hairpin siNA molecule of the invention comprises a loop portion comprising a non-nucleotide linker.

[0109] In another embodiment, a siNA molecule of the invention comprises an asymmetric hairpin structure, wherein the siNA is about 25 to about 50 (e.g., about 25, 26, 27, 28, 29, 30, 31, 32, 33, 34, 35, 36, 37, 38, 39, 40, 41, 42, 43, 44, 45, 46, 47, 48, 49, or 50) nucleotides in length having about 3 to about 25 (e.g., about 3, 4, 5, 6, 7, 8, 9, 10, 11, 12, 13, 14, 15, 16, 17, 18, 19, 20, 21, 22, 23, 24, or 25) base pairs, and wherein the siNA can include one or more chemical modifications comprising a structure having any of Formulae I-VII or any combination thereof. For example, an exemplary chemically-modified siNA molecule of the invention comprises a linear oligonucleotide having about 25 to about 35 (e.g., about 25, 26, 27, 28, 29, 30, 31, 32, 33, 34, or 35) nucleotides that is chemically-modified with one or more chemical modifications having any of Formulae I-VII or any combination thereof, wherein the linear oligonucleotide forms an asymmetric hairpin structure having about 3 to about 25 (e.g., about 3, 4, 5, 6, 7, 8, 9, 10, 11, 12, 13, 14, 15, 16, 17, 18, 19, 20, 21, 22, 23, 24, or 25) base pairs and a 5′-terminal phosphate group that can be chemically modified as described herein (for example a 5′-terminal phosphate group having Formula IV). In one embodiment, an asymmetric hairpin siNA molecule of the invention contains a stem loop motif, wherein the loop portion of the siNA molecule is biodegradable. In another embodiment, an asymmetric hairpin siNA molecule of the invention comprises a loop portion comprising a non-nucleotide linker.

[0110] In another embodiment, a siNA molecule of the invention comprises an asymmetric double stranded structure having separate polynucleotide strands comprising sense and antisense regions, wherein the antisense region is about 15 to about 30 (e.g., about 15, 16, 17, 18, 19, 20, 21, 22, 23, 24, 25, 26, 27, 28, 29, or 30) nucleotides in length, wherein the sense region is about 3 to about 25 (e.g., about 3, 4, 5, 6, 7, 8, 9, 10, 11, 12, 13, 14, 15, 16, 17, 18, 19, 20, 21, 22, 23, 24, or 25) nucleotides in length, wherein the sense region and the antisense region have at least 3 complementary nucleotides, and wherein the siNA can include one or more chemical modifications comprising a structure having any of Formulae I-VII or any combination thereof. For example, an exemplary chemically-modified siNA molecule of the invention comprises an asymmetric double stranded structure having separate polynucleotide strands comprising sense and antisense regions, wherein the antisense region is about 18 to about 23 (e.g., about 18, 19, 20, 21, 22, or 23) nucleotides in length and wherein the sense region is about 3 to about 15 (e.g., about 3, 4, 5, 6, 7, 8, 9, 10, 11, 12, 13, 14, or 15) nucleotides in length, wherein the sense region the antisense region have at least 3 complementary nucleotides, and wherein the siNA can include one or more chemical modifications comprising a structure having any of Formulae I-VII or any combination thereof. In another embodiment, the asymmetric double stranded siNA molecule can also have a 5′-terminal phosphate group that can be chemically modified as described herein (for example a 5′-terminal phosphate group having Formula IV).

[0111] In another embodiment, a siNA molecule of the invention comprises a circular nucleic acid molecule, wherein the siNA is about 38 to about 70 (e.g., about 38, 40, 45, 50, 55, 60, 65, or 70) nucleotides in length having about 15 to about 30 (e.g., about 15, 16, 17, 18, 19, 20, 21, 22, 23, 24, 25, 26, 27, 28, 29, or 30) base pairs, and wherein the siNA can include a chemical modification, which comprises a structure having any of Formulae I-VII or any combination thereof. For example, an exemplary chemically-modified siNA molecule of the invention comprises a circular oligonucleotide having about 42 to about 50 (e.g., about 42, 43, 44, 45, 46, 47, 48, 49, or 50) nucleotides that is chemically-modified with a chemical modification having any of Formulae I-VII or any combination thereof, wherein the circular oligonucleotide forms a dumbbell shaped structure having about 19 base pairs and 2 loops.

[0112] In another embodiment, a circular siNA molecule of the invention contains two loop motifs, wherein one or both loop portions of the siNA molecule is biodegradable. For example, a circular siNA molecule of the invention is designed such that degradation of the loop portions of the siNA molecule in vivo can generate a double-stranded siNA molecule with 3′-terminal overhangs, such as 3′-terminal nucleotide overhangs comprising about 2 nucleotides.

[0113] In one embodiment, a siNA molecule of the invention comprises at least one (e.g., about 1, 2, 3, 4, 5, 6, 7, 8, 9, 10, or more) abasic moiety, for example a compound having Formula V: [chemical structure]
wherein each R3, R4, R5, R6, R7, R8, R10, R11, R12, and R13 is independently H, OH, alkyl, substituted alkyl, alkaryl or aralkyl, F, Cl, Br, CN, CF3, OCF3, OCN, O-alkyl, S-alkyl, N-alkyl, O-alkenyl, S-alkenyl, N-alkenyl, SO-alkyl, alkyl-OSH, alkyl-OH, O-alkyl-OH, O-alkyl-SH, S-alkyl-OH, S-alkyl-SH, alkyl-S-alkyl, alkyl-O-alkyl, ONO2, NO2, N3, NH2, aminoalkyl, aminoacid, aminoacyl, ONH2, O-aminoalkyl, O-aminoacid, O-aminoacyl, heterocycloalkyl, heterocycloalkaryl, aminoalkylamino, polyalklylamino, substituted silyl, or a group having any of Formula I, II, III, IV, V, VI and/or VII, any of which can be included in the structure of the siNA molecule or serve as a point of attachment to the siNA molecule; R9 is O, S, CH2, S═O, CHF, or CF2. In one embodiment, R3 and/or R7 comprises a conjugate moiety and a linker (e.g., a nucleotide or non-nucleotide linker as described herein or otherwise known in the art). Non-limiting examples of conjugate moieties include ligands for cellular receptors, such as peptides derived from naturally occurring protein ligands; protein localization sequences, including cellular ZIP code sequences; antibodies; nucleic acid aptamers; vitamins and other co-factors, such as folate and N-acetylgalactosamine; polymers, such as polyethyleneglycol (PEG); phospholipids; cholesterol; steroids, and polyamines, such as PEI, spermine or spermidine.

[0114] In one embodiment, a siNA molecule of the invention comprises at least one (e.g., about 1, 2, 3, 4, 5, 6, 7, 8, 9, 10, or more) inverted abasic moiety, for example a compound having Formula VI: [chemical structure]
wherein each R3, R4, R5, R6, R7, R8, R10, R11, R12, and R13 is independently H, OH, alkyl, substituted alkyl, alkaryl or aralkyl, F, Cl, Br, CN, CF3, OCF3, OCN, O-alkyl, S-alkyl, N-alkyl, O-alkenyl, S-alkenyl, N-alkenyl, SO-alkyl, alkyl-OSH, alkyl-OH, O-alkyl-OH, O-alkyl-SH, S-alkyl-OH, S-alkyl-SH, alkyl-S-alkyl, alkyl-O-alkyl, ONO2, NO2, N3, NH2, aminoalkyl, aminoacid, aminoacyl, ONH2, O-aminoalkyl, O-aminoacid, O-aminoacyl, heterocycloalkyl, heterocycloalkaryl, aminoalkylamino, polyalklylamino, substituted silyl, or a group having any of Formula I, II, III, IV, V, VI and/or VII, any of which can be included in the structure of the siNA molecule or serve as a point of attachment to the siNA molecule; R9 is O, S, CH2, S═O, CHF, or CF2, and either R2, R3, R8 or R13 serve as points of attachment to the siNA molecule of the invention. In one embodiment, R3 and/or R7 comprises a conjugate moiety and a linker (e.g., a nucleotide or non-nucleotide linker as described herein or otherwise known in the art). Non-limiting examples of conjugate moieties include ligands for cellular receptors, such as peptides derived from naturally occurring protein ligands; protein localization sequences, including cellular ZIP code sequences; antibodies; nucleic acid aptamers; vitamins and other co-factors, such as folate and N-acetylgalactosamine; polymers, such as polyethyleneglycol (PEG); phospholipids; cholesterol; steroids, and polyamines, such as PEI, spermine or spermidine.

[0115] In another embodiment, a siNA molecule of the invention comprises at least one (e.g., about 1, 2, 3, 4, 5, 6, 7, 8, 9, 10, or more) substituted polyalkyl moieties, for example a compound having Formula VII: [chemical structure]
wherein each n is independently an integer from 1 to 12, each R1, R2 and R3 is independently H, OH, alkyl, substituted alkyl, alkaryl or aralkyl, F, Cl, Br, CN, CF3, OCF3, OCN, O-alkyl, S-alkyl, N-alkyl, O-alkenyl, S-alkenyl, N-alkenyl, SO-alkyl, alkyl-OSH, alkyl-OH, O-alkyl-OH, O-alkyl-SH, S-alkyl-OH, S-alkyl-SH, alkyl-S-alkyl, alkyl-O-alkyl, ONO2, NO2, N3, NH2, aminoalkyl, aminoacid, aminoacyl, ONH2, O-aminoalkyl, O-aminoacid, O-aminoacyl, heterocycloalkyl, heterocycloalkaryl, aminoalkylamino, polyalklylamino, substituted silyl, or a group having any of Formula I, II, III, IV, V, VI and/or VII, any of which can be included in the structure of the siNA molecule or serve as a point of attachment to the siNA molecule. In one embodiment, R3 and/or R1 comprises a conjugate moiety and a linker (e.g., a nucleotide or non-nucleotide linker as described herein or otherwise known in the art). Non-limiting examples of conjugate moieties include ligands for cellular receptors, such as peptides derived from naturally occurring protein ligands; protein localization sequences, including cellular ZIP code sequences; antibodies; nucleic acid aptamers; vitamins and other co-factors, such as folate and N-acetylgalactosamine; polymers, such as polyethyleneglycol (PEG); phospholipids; cholesterol; steroids, and polyamines, such as PEI, spermine or spermidine.

[0116] By “ZIP code” sequences is meant, any peptide or protein sequence that is involved in cellular topogenic signaling mediated transport (see for example Ray et al., 2004, Science, 306(1501): 1505)

[0117] Each nucleotide within the double stranded siNA molecule can independently have a chemical modification comprising the structure of any of Formulae I-VIII. Thus, in one embodiment, one or more nucleotide positions of a siNA molecule of the invention comprises a chemical modification having structure of any of Formulae I-VII or any other modification herein. In one embodiment, each nucleotide position of a siNA molecule of the invention comprises a chemical modification having structure of any of Formulae I-VII or any other modification herein.

[0118] In one embodiment, one or more nucleotide positions of one or both strands of a double stranded siNA molecule of the invention comprises a chemical modification having structure of any of Formulae 1-VII or any other modification herein. In one embodiment, each nucleotide position of one or both strands of a double stranded siNA molecule of the invention comprises a chemical modification having structure of any of Formulae I-VII or any other modification herein.

[0119] In another embodiment, the invention features a compound having Formula VII, wherein R1 and R2 are hydroxyl (OH) groups, n=1, and R3 comprises O and is the point of attachment to the 3′-end, the 5′-end, or both of the 3′ and 5′-ends of one or both strands of a double-stranded siNA molecule of the invention or to a single-stranded siNA molecule of the invention. This modification is referred to herein as “glyceryl” (for example modification 6 in FIG. 10).

[0120] In another embodiment, a chemically modified nucleoside or non-nucleoside (e.g. a moiety having any of Formula V, VI or VII) of the invention is at the 3′-end, the 5′-end, or both of the 3′ and 5′-ends of a siNA molecule of the invention. For example, chemically modified nucleoside or non-nucleoside (e.g., a moiety having Formula V, VI or VII) can be present at the 3′-end, the 5′-end, or both of the 3′ and 5′-ends of the antisense strand, the sense strand, or both antisense and sense strands of the siNA molecule. In one embodiment, the chemically modified nucleoside or non-nucleoside (e.g., a moiety having Formula V, VI or VII) is present at the 5′-end and 3′-end of the sense strand and the 3′-end of the antisense strand of a double stranded siNA molecule of the invention. In one embodiment, the chemically modified nucleoside or non-nucleoside (e.g., a moiety having Formula V, VI or VII) is present at the terminal position of the 5′-end and 3′-end of the sense strand and the 3′-end of the antisense strand of a double stranded siNA molecule of the invention. In one embodiment, the chemically modified nucleoside or non-nucleoside (e.g., a moiety having Formula V, VI or VII) is present at the two terminal positions of the 5′-end and 3′-end of the sense strand and the 3′-end of the antisense strand of a double stranded siNA molecule of the invention. In one embodiment, the chemically modified nucleoside or non-nucleoside (e.g., a moiety having Formula V, VI or VII) is present at the penultimate position of the 5′-end and 3′-end of the sense strand and the 3′-end of the antisense strand of a double stranded siNA molecule of the invention. In addition, a moiety having Formula VII can be present at the 3′-end or the 5′-end of a hairpin siNA molecule as described herein.

[0121] In another embodiment, a siNA molecule of the invention comprises an abasic residue having Formula V or VI, wherein the abasic residue having Formula VI or VI is connected to the siNA construct in a 3′-3′, 3′-2′, 2′-3′, or 5′-5′ configuration, such as at the 3′-end, the 5′-end, or both of the 3′ and 5′-ends of one or both siNA strands.

[0122] In one embodiment, a siNA molecule of the invention comprises one or more (e.g., about 1, 2, 3, 4, 5, 6, 7, 8, 9, 10, or more) locked nucleic acid (LNA) nucleotides, for example, at the 5′-end, the 3′-end, both of the 5′ and 3′-ends, or any combination thereof, of the siNA molecule.

[0123] In one embodiment, a siNA molecule of the invention comprises one or more (e.g., about 1, 2, 3, 4, 5, 6, 7, 8, 9, 10, or more) 4′-thio nucleotides, for example, at the 5′-end, the 3′-end, both of the 5′ and 3′-ends, or any combination thereof, of the siNA molecule.

[0124] In another embodiment, a siNA molecule of the invention comprises one or more (e.g., about 1, 2, 3, 4, 5, 6, 7, 8, 9, 10, or more) acyclic nucleotides, for example, at the 5′-end, the 3′-end, both of the 5′ and 3′-ends, or any combination thereof, of the siNA molecule.

[0125] In one embodiment, the invention features a chemically-modified short interfering nucleic acid (siNA) molecule of the invention comprising a sense region, wherein any (e.g., one or more or all) pyrimidine nucleotides present in the sense region are 2′-deoxy-2′-fluoro pyrimidine nucleotides (e.g., wherein all pyrimidine nucleotides are 2′-deoxy-2′-fluoro pyrimidine nucleotides or alternately a plurality of pyrimidine nucleotides are 2′-deoxy-2′-fluoro pyrimidine nucleotides), and wherein any (e.g., one or more or all) purine nucleotides present in the sense region are 2′-deoxy purine nucleotides (e.g., wherein all purine nucleotides are 2′-deoxy purine nucleotides or alternately a plurality of purine nucleotides are 2′-deoxy purine nucleotides).

[0126] In one embodiment, the invention features a chemically-modified short interfering nucleic acid (siNA) molecule of the invention comprising a sense region, wherein any (e.g., one or more or all) pyrimidine nucleotides present in the sense region are 2′-deoxy-2′-fluoro, 4′-thio, 2′-O-trifluoromethyl, 2′-O-ethyl-trifluoromethoxy, or 2′-O-difluoromethoxy-ethoxy pyrimidine nucleotides (e.g., wherein all pyrimidine nucleotides are 2′-deoxy-2′-fluoro, 4′-thio, 2′-O-trifluoromethyl, 2′-O-ethyl-trifluoromethoxy, or 2′-O-difluoromethoxy-ethoxy pyrimidine nucleotides or alternately a plurality of pyrimidine nucleotides are 2′-deoxy-2′-fluoro, 4′-thio, 2′-O-trifluoromethyl, 2′-O-ethyl-trifluoromethoxy, or 2′-O-difluoromethoxy-ethoxy pyrimidine nucleotides), and wherein any (e.g., one or more or all) purine nucleotides present in the sense region are 2′-deoxy purine nucleotides (e.g., wherein all purine nucleotides are 2′-deoxy purine nucleotides or alternately a plurality of purine nucleotides are 2′-deoxy purine nucleotides), wherein any nucleotides comprising a 3′-terminal nucleotide overhang that are present in said sense region are 2′-deoxy nucleotides.

[0127] In one embodiment, the invention features a chemically-modified short interfering nucleic acid (siNA) molecule of the invention comprising a sense region, wherein any (e.g., one or more or all) pyrimidine nucleotides present in the sense region are 2′-deoxy-2′-fluoro, 4′-thio, 2′-O-trifluoromethyl, 2′-O-ethyl-trifluoromethoxy, or 2′-O-difluoromethoxy-ethoxy pyrimidine nucleotides (e.g., wherein all pyrimidine nucleotides are 2′-deoxy-2′-fluoro, 4′-thio, 2′-O-trifluoromethyl, 2′-O-ethyl-trifluoromethoxy, or 2′-O-difluoromethoxy-ethoxy pyrimidine nucleotides or alternately a plurality of pyrimidine nucleotides are 2′-deoxy-2′-fluoro, 4′-thio, 2′-O-trifluoromethyl, 2′-O-ethyl-trifluoromethoxy, or 2′-O-difluoromethoxy-ethoxy pyrimidine nucleotides), and wherein any (e.g., one or more or all) purine nucleotides present in the sense region are 2′-O-methyl purine nucleotides (e.g., wherein all purine nucleotides are 2′-O-methyl, 4′-thio, 2′-O-trifluoromethyl, 2′-O-ethyl-trifluoromethoxy, or 2′-O-difluoromethoxy-ethoxy purine nucleotides or alternately a plurality of purine nucleotides are 2′-O-methyl, 4′-thio, 2′-O-trifluoromethyl, 2′-O-ethyl-trifluoromethoxy, or 2′-O-difluoromethoxy-ethoxy purine nucleotides).

[0128] In one embodiment, the invention features a chemically-modified short interfering nucleic acid (siNA) molecule of the invention comprising a sense region, wherein any (e.g., one or more or all) pyrimidine nucleotides present in the sense region are 2′-deoxy-2′-fluoro, 4′-thio, 2′-O-trifluoromethyl, 2′-O-ethyl-trifluoromethoxy, or 2′-O-difluoromethoxy-ethoxy pyrimidine nucleotides (e.g., wherein all pyrimidine nucleotides are 2′-deoxy-2′-fluoro, 4′-thio, 2′-O-trifluoromethyl, 2′-O-ethyl-trifluoromethoxy, or 2′-O-difluoromethoxy-ethoxy pyrimidine nucleotides or alternately a plurality of pyrimidine nucleotides are 2′-deoxy-2′-fluoro, 4′-thio, 2′-O-trifluoromethyl, 2′-O-ethyl-trifluoromethoxy, or 2′-O-difluoromethoxy-ethoxy pyrimidine nucleotides), wherein any (e.g., one or more or all) purine nucleotides present in the sense region are 2′-O-methyl, 4′-thio, 2′-O-trifluoromethyl, 2′-O-ethyl-trifluoromethoxy, or 2′-O-difluoromethoxy-ethoxy purine nucleotides (e.g., wherein all purine nucleotides are 2′-O-methyl, 4′-thio, 2′-O-trifluoromethyl, 2′-O-ethyl-trifluoromethoxy, or 2′-O-difluoromethoxy-ethoxy purine nucleotides or alternately a plurality of purine nucleotides are 2′-O-methyl, 4′-thio, 2′-O-trifluoromethyl, 2′-O-ethyl-trifluoromethoxy, or 2′-O-difluoromethoxy-ethoxy purine nucleotides), and wherein any nucleotides comprising a 3′-terminal nucleotide overhang that are present in said sense region are 2′-deoxy nucleotides.

[0129] In one embodiment, the invention features a chemically-modified short interfering nucleic acid (siNA) molecule of the invention comprising an antisense region, wherein any (e.g., one or more or all) pyrimidine nucleotides present in the antisense region are 2′-deoxy-2′-fluoro, 4′-thio, 2′-O-trifluoromethyl, 2′-O-ethyl-trifluoromethoxy, or 2′-O-difluoromethoxy-ethoxy pyrimidine nucleotides (e.g., wherein all pyrimidine nucleotides are 2′-deoxy-2′-fluoro, 4′-thio, 2′-O-trifluoromethyl, 2′-O-ethyl-trifluoromethoxy, or 2′-O-difluoromethoxy-ethoxy pyrimidine nucleotides or alternately a plurality of pyrimidine nucleotides are 2′-deoxy-2′-fluoro, 4′-thio, 2′-O-trifluoromethyl, 2′-O-ethyl-trifluoromethoxy, or 2′-O-difluoromethoxy-ethoxy pyrimidine nucleotides), and wherein any (e.g., one or more or all) purine nucleotides present in the antisense region are 2′-O-methyl, 4′-thio, 2′-O-trifluoromethyl, 2′-O-ethyl-trifluoromethoxy, or 2′-O-difluoromethoxy-ethoxy purine nucleotides (e.g., wherein all purine nucleotides are 2′-O-methyl, 4′-thio, 2′-O-trifluoromethyl, 2′-O-ethyl-trifluoromethoxy, or 2′-O-difluoromethoxy-ethoxy purine nucleotides or alternately a plurality of purine nucleotides are 2′-O-methyl, 4′-thio, 2′-O-trifluoromethyl, 2′-O-ethyl-trifluoromethoxy, or 2′-O-difluoromethoxy-ethoxy purine nucleotides).

[0130] In one embodiment, the invention features a chemically-modified short interfering nucleic acid (siNA) molecule of the invention comprising an antisense region, wherein any (e.g., one or more or all) pyrimidine nucleotides present in the antisense region are 2′-deoxy-2′-fluoro, 4′-thio, 2′-O-trifluoromethyl, 2′-O-ethyl-trifluoromethoxy, or 2′-O-difluoromethoxy-ethoxy pyrimidine nucleotides (e.g., wherein all pyrimidine nucleotides are 2′-deoxy-2′-fluoro, 4′-thio, 2′-O-trifluoromethyl, 2′-O-ethyl-trifluoromethoxy, or 2′-O-difluoromethoxy-ethoxy pyrimidine nucleotides or alternately a plurality of pyrimidine nucleotides are 2′-deoxy-2′-fluoro, 4′-thio, 2′-O-trifluoromethyl, 2′-O-ethyl-trifluoromethoxy, or 2′-O-difluoromethoxy-ethoxy pyrimidine nucleotides), wherein any (e.g., one or more or all) purine nucleotides present in the antisense region are 2′-O-methyl, 4′-thio, 2′-O-trifluoromethyl, 2′-O-ethyl-trifluoromethoxy, or 2′-O-difluoromethoxy-ethoxy purine nucleotides (e.g., wherein all purine nucleotides are 2′-O-methyl, 4′-thio, 2′-O-trifluoromethyl, 2′-O-ethyl-trifluoromethoxy, or 2′-O-difluoromethoxy-ethoxy purine nucleotides or alternately a plurality of purine nucleotides are 2′-O-methyl, 4′-thio, 2′-O-trifluoromethyl, 2′-O-ethyl-trifluoromethoxy, or 2′-O-difluoromethoxy-ethoxy purine nucleotides), and wherein any nucleotides comprising a 3′-terminal nucleotide overhang that are present in said antisense region are 2′-deoxy nucleotides.

[0131] In one embodiment, the invention features a chemically-modified short interfering nucleic acid (siNA) molecule of the invention comprising an antisense region, wherein any (e.g., one or more or all) pyrimidine nucleotides present in the antisense region are 2′-deoxy-2′-fluoro, 4′-thio, 2′-O-trifluoromethyl, 2′-O-ethyl-trifluoromethoxy, or 2′-O-difluoromethoxy-ethoxy pyrimidine nucleotides (e.g., wherein all pyrimidine nucleotides are 2′-deoxy-2′-fluoro, 4′-thio, 2′-O-trifluoromethyl, 2′-O-ethyl-trifluoromethoxy, or 2′-O-difluoromethoxy-ethoxy pyrimidine nucleotides or alternately a plurality of pyrimidine nucleotides are 2′-deoxy-2′-fluoro, 4′-thio, 2′-O-trifluoromethyl, 2′-O-ethyl-trifluoromethoxy, or 2′-O-difluoromethoxy-ethoxy pyrimidine nucleotides), and wherein any (e.g., one or more or all) purine nucleotides present in the antisense region are 2′-deoxy purine nucleotides (e.g., wherein all purine nucleotides are 2′-deoxy purine nucleotides or alternately a plurality of purine nucleotides are 2′-deoxy purine nucleotides).

[0132] In one embodiment, the invention features a chemically-modified short interfering nucleic acid (siNA) molecule of the invention comprising an antisense region, wherein any (e.g., one or more or all) pyrimidine nucleotides present in the antisense region are 2′-deoxy-2′-fluoro, 4′-thio, 2′-O-trifluoromethyl, 2′-O-ethyl-trifluoromethoxy, or 2′-O-difluoromethoxy-ethoxy pyrimidine nucleotides (e.g., wherein all pyrimidine nucleotides are 2′-deoxy-2′-fluoro, 4′-thio, 2′-O-trifluoromethyl, 2′-O-ethyl-trifluoromethoxy, or 2′-O-difluoromethoxy-ethoxy pyrimidine nucleotides or alternately a plurality of pyrimidine nucleotides are 2′-deoxy-2′-fluoro, 4′-thio, 2′-O-trifluoromethyl, 2′-O-ethyl-trifluoromethoxy, or 2′-O-difluoromethoxy-ethoxy pyrimidine nucleotides), and wherein any (e.g., one or more or all) purine nucleotides present in the antisense region are 2′-O-methyl, 4′-thio, 2′-O-trifluoromethyl, 2′-O-ethyl-trifluoromethoxy, or 2′-O-difluoromethoxy-ethoxy purine nucleotides (e.g., wherein all purine nucleotides are 2′-O-methyl, 4′-thio, 2′-O-trifluoromethyl, 2′-O-ethyl-trifluoromethoxy, or 2′-O-difluoromethoxy-ethoxy purine nucleotides or alternately a plurality of purine nucleotides are 2′-O-methyl, 4′-thio, 2′-O-trifluoromethyl, 2′-O-ethyl-trifluoromethoxy, or 2′-O-difluoromethoxy-ethoxy purine nucleotides).

[0133] In one embodiment, the invention features a chemically-modified short interfering nucleic acid (siNA) molecule of the invention capable of mediating RNA interference (RNAi) inside a cell or reconstituted in vitro system comprising a sense region, wherein one or more pyrimidine nucleotides present in the sense region are 2′-deoxy-2′-fluoro, 4′-thio, 2′-O-trifluoromethyl, 2′-O-ethyl-trifluoromethoxy, or 2′-O-difluoromethoxy-ethoxy pyrimidine nucleotides (e.g., wherein all pyrimidine nucleotides are 2′-deoxy-2′-fluoro, 4′-thio, 2′-O-trifluoromethyl, 2′-O-ethyl-trifluoromethoxy, or 2′-O-difluoromethoxy-ethoxy pyrimidine nucleotides or alternately a plurality of pyrimidine nucleotides are 2′-deoxy-2′-fluoro, 4′-thio, 2′-O-trifluoromethyl, 2′-O-ethyl-trifluoromethoxy, or 2′-O-difluoromethoxy-ethoxy pyrimidine nucleotides), and one or more purine nucleotides present in the sense region are 2′-deoxy purine nucleotides (e.g., wherein all purine nucleotides are 2′-deoxy purine nucleotides or alternately a plurality of purine nucleotides are 2′-deoxy purine nucleotides), and an antisense region, wherein one or more pyrimidine nucleotides present in the antisense region are 2′-deoxy-2′-fluoro, 4′-thio, 2′-O-trifluoromethyl, 2′-O-ethyl-trifluoromethoxy, or 2′-O-difluoromethoxy-ethoxy pyrimidine nucleotides (e.g., wherein all pyrimidine nucleotides are 2′-deoxy-2′-fluoro, 4′-thio, 2′-O-trifluoromethyl, 2′-O-ethyl-trifluoromethoxy, or 2′-O-difluoromethoxy-ethoxy pyrimidine nucleotides or alternately a plurality of pyrimidine nucleotides are 2′-deoxy-2′-fluoro, 4′-thio, 2′-O-trifluoromethyl, 2′-O-ethyl-trifluoromethoxy, or 2′-O-difluoromethoxy-ethoxy pyrimidine nucleotides), and one or more purine nucleotides present in the antisense region are 2′-O-methyl, 4′-thio, 2′-O-trifluoromethyl, 2′-O-ethyl-trifluoromethoxy, or 2′-O-difluoromethoxy-ethoxy purine nucleotides (e.g., wherein all purine nucleotides are 2′-O-methyl, 4′-thio, 2′-O-trifluoromethyl, 2′-O-ethyl-trifluoromethoxy, or 2′-O-difluoromethoxy-ethoxy purine nucleotides or alternately a plurality of purine nucleotides are 2′-O-methyl, 4′-thio, 2′-O-trifluoromethyl, 2′-O-ethyl-trifluoromethoxy, or 2′-O-difluoromethoxy-ethoxy purine nucleotides). The sense region and/or the antisense region can have a terminal cap modification, such as any modification described herein or shown in FIG. 10, that is optionally present at the 3′-end, the 5′-end, or both of the 3′and 5′-ends of the sense and/or antisense sequence. The sense and/or antisense region can optionally further comprise a 3′-terminal nucleotide overhang having about 1 to about 4 (e.g., about 1, 2, 3, or 4) 2′-deoxynucleotides. The overhang nucleotides can further comprise one or more (e.g., about 1, 2, 3, 4 or more) phosphorothioate, phosphonoacetate, and/or thiophosphonoacetate internucleotide linkages. Non-limiting examples of these chemically-modified siNAs are shown in FIGS. 4 and 5 and Table III herein. In any of these described embodiments, the purine nucleotides present in the sense region are alternatively 2′-O-methyl, 4′-thio, 2′-O-trifluoromethyl, 2′-O-ethyl-trifluoromethoxy, or 2′-O-difluoromethoxy-ethoxy purine nucleotides (e.g., wherein all purine nucleotides are 2′-O-methyl, 4′-thio, 2′-O-trifluoromethyl, 2′-O-ethyl-trifluoromethoxy, or 2′-O-difluoromethoxy-ethoxy purine nucleotides or alternately a plurality of purine nucleotides are 2′-O-methyl, 4′-thio, 2′-O-trifluoromethyl, 2′-O-ethyl-trifluoromethoxy, or 2′-O-difluoromethoxy-ethoxy purine nucleotides) and one or more purine nucleotides present in the antisense region are 2′-O-methyl, 4′-thio, 2′-O-trifluoromethyl, 2′-O-ethyl-trifluoromethoxy, or 2′-O-difluoromethoxy-ethoxy purine nucleotides (e.g., wherein all purine nucleotides are 2′-O-methyl, 4′-thio, 2′-O-trifluoromethyl, 2′-O-ethyl-trifluoromethoxy, or 2′-O-difluoromethoxy-ethoxy purine nucleotides or alternately a plurality of purine nucleotides are 2′-O-methyl, 4′-thio, 2′-O-trifluoromethyl, 2′-O-ethyl-trifluoromethoxy, or 2′-O-difluoromethoxy-ethoxy purine nucleotides). Also, in any of these embodiments, one or more purine nucleotides present in the sense region are alternatively purine ribonucleotides (e.g., wherein all purine nucleotides are purine ribonucleotides or alternately a plurality of purine nucleotides are purine ribonucleotides) and any purine nucleotides present in the antisense region are 2′-O-methyl, 4′-thio, 2′-O-trifluoromethyl, 2′-O-ethyl-trifluoromethoxy, or 2′-O-difluoromethoxy-ethoxy purine nucleotides (e.g., wherein all purine nucleotides are 2′-O-methyl, 4′-thio, 2′-O-trifluoromethyl, 2′-O-ethyl-trifluoromethoxy, or 2′-O-difluoromethoxy-ethoxy purine nucleotides or alternately a plurality of purine nucleotides are 2′-O-methyl, 4′-thio, 2′-O-trifluoromethyl, 2′-O-ethyl-trifluoromethoxy, or 2′-O-difluoromethoxy-ethoxy purine nucleotides). Additionally, in any of these embodiments, one or more purine nucleotides present in the sense region and/or present in the antisense region are alternatively selected from the group consisting of 2′-deoxy nucleotides, locked nucleic acid (LNA) nucleotides, 2′-methoxyethyl nucleotides, 4′-thionucleotides, 2′-O-trifluoromethyl nucleotides, 2′-O-ethyl-trifluoromethoxy nucleotides, 2′-O-difluoromethoxy-ethoxy nucleotides and 2′-O-methyl nucleotides (e.g., wherein all purine nucleotides are selected from the group consisting of 2′-deoxy nucleotides, locked nucleic acid (LNA) nucleotides, 2′-methoxyethyl nucleotides, 4′-thionucleotides, 2′-O-trifluoromethyl nucleotides, 2′-O-ethyl-trifluoromethoxy nucleotides, 2′-O-difluoromethoxy-ethoxy nucleotides and 2′-O-methyl nucleotides or alternately a plurality of purine nucleotides are selected from the group consisting of 2′-deoxy nucleotides, locked nucleic acid (LNA) nucleotides, 2′-methoxyethyl nucleotides, 4′-thionucleotides, 2′-O-trifluoromethyl nucleotides, 2′-O-ethyl-trifluoromethoxy nucleotides, 2′-O-difluoromethoxy-ethoxy nucleotides and 2′-O-methyl nucleotides).

[0134] In another embodiment, any modified nucleotides present in the siNA molecules of the invention, preferably in the antisense strand of the siNA molecules of the invention, but also optionally in the sense and/or both antisense and sense strands, comprise modified nucleotides having properties or characteristics similar to naturally occurring ribonucleotides. For example, the invention features siNA molecules including modified nucleotides having a Northern conformation (e.g., Northern pseudorotation cycle, see for example Saenger, Principles of Nucleic Acid Structure, Springer-Verlag ed., 1984) otherwise known as a “ribo-like” or “A-form helix” configuration. As such, chemically modified nucleotides present in the siNA molecules of the invention, preferably in the antisense strand of the siNA molecules of the invention, but also optionally in the sense and/or both antisense and sense strands, are resistant to nuclease degradation while at the same time maintaining the capacity to mediate RNAi. Non-limiting examples of nucleotides having a northern configuration include locked nucleic acid (LNA) nucleotides (e.g., 2′-O, 4′-C-methylene-(D-ribofuranosyl) nucleotides); 2′-methoxyethoxy (MOE) nucleotides; 2′-methyl-thio-ethyl, 2′-deoxy-2′-fluoro nucleotides, 2′-deoxy-2′-chloro nucleotides, 2′-azido nucleotides, 2′-O-trifluoromethyl nucleotides, 2′-O-ethyl-trifluoromethoxy nucleotides, 2′-O-difluoromethoxy-ethoxy nucleotides, 4′-thio nucleotides and 2′-O-methyl nucleotides.

[0135] In one embodiment, the sense strand of a double stranded siNA molecule of the invention comprises a terminal cap moiety, (see for example FIG. 10) such as an inverted deoxyabaisc moiety, at the 3′-end, 5′-end, or both 3′ and 5′-ends of the sense strand.

[0136] In one embodiment, the invention features a chemically-modified short interfering nucleic acid molecule (siNA) capable of mediating RNA interference (RNAi) inside a cell or reconstituted in vitro system, wherein the chemical modification comprises a conjugate covalently attached to the chemically-modified siNA molecule. Non-limiting examples of conjugates contemplated by the invention include conjugates and ligands described in Vargeese et al., U.S. Ser. No. 10/427,160, filed Apr. 30, 2003, incorporated by reference herein in its entirety, including the drawings. In another embodiment, the conjugate is covalently attached to the chemically-modified siNA molecule via a biodegradable linker. In one embodiment, the conjugate molecule is attached at the 3′-end of either the sense strand, the antisense strand, or both strands of the chemically-modified siNA molecule. In another embodiment, the conjugate molecule is attached at the 5′-end of either the sense strand, the antisense strand, or both strands of the chemically-modified siNA molecule. In yet another embodiment, the conjugate molecule is attached both the 3′-end and 5′-end of either the sense strand, the antisense strand, or both strands of the chemically-modified siNA molecule, or any combination thereof. In one embodiment, a conjugate molecule of the invention comprises a molecule that facilitates delivery of a chemically-modified siNA molecule into a biological system, such as a cell. In another embodiment, the conjugate molecule attached to the chemically-modified siNA molecule is a ligand for a cellular receptor, such as peptides derived from naturally occurring protein ligands; protein localization sequences, including cellular ZIP code sequences; antibodies; nucleic acid aptamers; vitamins and other co-factors, such as folate and N-acetylgalactosamine; polymers, such as polyethyleneglycol (PEG); phospholipids; cholesterol; steroids, and polyamines, such as PEI, spermine or spermidine. Examples of specific conjugate molecules contemplated by the instant invention that can be attached to chemically-modified siNA molecules are described in Vargeese et al., U.S. Ser. No. 10/201,394, filed Jul. 22, 2002 incorporated by reference herein. The type of conjugates used and the extent of conjugation of siNA molecules of the invention can be evaluated for improved pharmacokinetic profiles, bioavailability, and/or stability of siNA constructs while at the same time maintaining the ability of the siNA to mediate RNAi activity. As such, one skilled in the art can screen siNA constructs that are modified with various conjugates to determine whether the siNA conjugate complex possesses improved properties while maintaining the ability to mediate RNAi, for example in animal models as are generally known in the art.

[0137] In one embodiment, the invention features a short interfering nucleic acid (siNA) molecule of the invention, wherein the siNA further comprises a nucleotide, non-nucleotide, or mixed nucleotide/non-nucleotide linker that joins the sense region of the siNA to the antisense region of the siNA. In one embodiment, a nucleotide, non-nucleotide, or mixed nucleotide/non-nucleotide linker is used, for example, to attach a conjugate moiety to the siNA. In one embodiment, a nucleotide linker of the invention can be a linker of ≧2 nucleotides in length, for example about 3, 4, 5, 6, 7, 8, 9, or 10 nucleotides in length. In another embodiment, the nucleotide linker can be a nucleic acid aptamer. By “aptamer” or “nucleic acid aptamer” as used herein is meant a nucleic acid molecule that binds specifically to a HCV target molecule wherein the nucleic acid molecule has sequence that comprises a sequence recognized by the HCV target molecule in its natural setting. Alternately, an aptamer can be a nucleic acid molecule that binds to a HCV target molecule where the HCV target molecule does not naturally bind to a nucleic acid. The HCV target molecule can be any molecule of interest. For example, the aptamer can be used to bind to a ligand-binding domain of a protein, thereby preventing interaction of the naturally occurring ligand with the protein. This is a non-limiting example and those in the art will recognize that other embodiments can be readily generated using techniques generally known in the art. (See, for example, Gold et al., 1995, Annu. Rev. Biochem., 64, 763; Brody and Gold, 2000, J. Biotechnol., 74, 5; Sun, 2000, Curr. Opin. Mol. Ther., 2, 100; Kusser, 2000, J. Biotechnol., 74, 27; Hermann and Patel, 2000, Science, 287, 820; and Jayasena, 1999, Clinical Chemistry, 45, 1628.)

[0138] In yet another embodiment, a non-nucleotide linker of the invention comprises abasic nucleotide, polyether, polyamine, polyamide, peptide, carbohydrate, lipid, polyhydrocarbon, or other polymeric compounds (e.g. polyethylene glycols such as those having between 2 and 100 ethylene glycol units). Specific examples include those described by Seela and Kaiser, Nucleic Acids Res. 1990, 18:6353 and Nucleic Acids Res. 1987, 15:3113; Cload and Schepartz, J. Am. Chem. Soc. 1991, 113:6324; Richardson and Schepartz, J. Am. Chem. Soc. 1991, 113:5109; Ma et al., Nucleic Acids Res. 1993, 21:2585 and Biochemistry 1993, 32:1751; Durand et al., Nucleic Acids Res. 1990, 18:6353; McCurdy et al., Nucleosides & Nucleotides 1991, 10:287; Jschke et al., Tetrahedron Lett. 1993, 34:301; Ono et al., Biochemistry 1991, 30:9914; Arnold et al., International Publication No. WO 89/02439; Usman et al., International Publication No. WO 95/06731; Dudycz et al., International Publication No. WO 95/11910 and Ferentz and Verdine, J. Am. Chem. Soc. 1991, 113:4000, all hereby incorporated by reference herein. A “non-nucleotide” further means any group or compound that can be incorporated into a nucleic acid chain in the place of one or more nucleotide units, including either sugar and/or phosphate substitutions, and allows the remaining bases to exhibit their enzymatic activity. The group or compound can be abasic in that it does not contain a commonly recognized nucleotide base, such as adenosine, guanine, cytosine, uracil or thymine, for example at the C1 position of the sugar.

[0139] In one embodiment, the invention features a short interfering nucleic acid (siNA) molecule capable of mediating RNA interference (RNAi) inside a cell or reconstituted in vitro system, wherein one or both strands of the siNA molecule that are assembled from two separate oligonucleotides do not comprise any ribonucleotides. For example, a siNA molecule can be assembled from a single oligonculeotide where the sense and antisense regions of the siNA comprise separate oligonucleotides that do not have any ribonucleotides (e.g., nucleotides having a 2′-OH group) present in the oligonucleotides. In another example, a siNA molecule can be assembled from a single oligonculeotide where the sense and antisense regions of the siNA are linked or circularized by a nucleotide or non-nucleotide linker as described herein, wherein the oligonucleotide does not have any ribonucleotides (e.g., nucleotides having a 2′-OH group) present in the oligonucleotide. Applicant has surprisingly found that the presense of ribonucleotides (e.g., nucleotides having a 2′-hydroxyl group) within the siNA molecule is not required or essential to support RNAi activity. As such, in one embodiment, all positions within the siNA can include chemically modified nucleotides and/or non-nucleotides such as nucleotides and or non-nucleotides having Formula I, II, III, IV, V, VI, or VII or any combination thereof to the extent that the ability of the siNA molecule to support RNAi activity in a cell is maintained.

[0140] In one embodiment, a siNA molecule of the invention is a single stranded siNA molecule that mediates RNAi activity in a cell or reconstituted in vitro system comprising a single stranded polynucleotide having complementarity to a HCV target nucleic acid sequence. In another embodiment, the single stranded siNA molecule of the invention comprises a 5′-terminal phosphate group. In another embodiment, the single stranded siNA molecule of the invention comprises a 5′-terminal phosphate group and a 3′-terminal phosphate group (e.g., a 2′,3′-cyclic phosphate). In another embodiment, the single stranded siNA molecule of the invention comprises about 15 to about 30 (e.g., about 15, 16, 17, 18, 19, 20, 21, 22, 23, 24, 25, 26, 27, 28, 29, or 30) nucleotides. In yet another embodiment, the single stranded siNA molecule of the invention comprises one or more chemically modified nucleotides or non-nucleotides described herein. For example, all the positions within the siNA molecule can include chemically-modified nucleotides such as nucleotides having any of Formulae I-VII, or any combination thereof to the extent that the ability of the siNA molecule to support RNAi activity in a cell is maintained.

[0141] In one embodiment, a siNA molecule of the invention is a single stranded siNA molecule that mediates RNAi activity in a cell or reconstituted in vitro system comprising a single stranded polynucleotide having complementarity to a HCV target nucleic acid sequence, wherein one or more pyrimidine nucleotides present in the siNA are 2′-deoxy-2′-fluoro, 4′-thio, 2′-O-trifluoromethyl, 2′-O-ethyl-trifluoromethoxy, or 2′-O-difluoromethoxy-ethoxy pyrimidine nucleotides (e.g., wherein all pyrimidine nucleotides are 2′-deoxy-2′-fluoro, 4′-thio, 2′-O-trifluoromethyl, 2′-O-ethyl-trifluoromethoxy, or 2′-O-difluoromethoxy-ethoxy pyrimidine nucleotides or alternately a plurality of pyrimidine nucleotides are 2′-deoxy-2′-fluoro, 4′-thio, 2′-O-trifluoromethyl, 2′-O-ethyl-trifluoromethoxy, or 2′-O-difluoromethoxy-ethoxy pyrimidine nucleotides), and wherein any purine nucleotides present in the antisense region are 2′-O-methyl, 4′-thio, 2′-O-trifluoromethyl, 2′-O-ethyl-trifluoromethoxy, or 2′-O-difluoromethoxy-ethoxy purine nucleotides (e.g., wherein all purine nucleotides are 2′-O-methyl, 4′-thio, 2′-O-trifluoromethyl, 2′-O-ethyl-trifluoromethoxy, or 2′-O-difluoromethoxy-ethoxy purine nucleotides or alternately a plurality of purine nucleotides are 2′-O-methyl, 4′-thio, 2′-O-trifluoromethyl, 2′-O-ethyl-trifluoromethoxy, or 2′-O-difluoromethoxy-ethoxy purine nucleotides), and a terminal cap modification, such as any modification described herein or shown in FIG. 10, that is optionally present at the 3′-end, the 5′-end, or both of the 3′ and 5′-ends of the antisense sequence. The siNA optionally further comprises about 1 to about 4 or more (e.g., about 1, 2, 3, 4 or more) terminal 2′-deoxynucleotides at the 3′-end of the siNA molecule, wherein the terminal nucleotides can further comprise one or more (e.g., 1, 2, 3, 4 or more) phosphorothioate, phosphonoacetate, and/or thiophosphonoacetate internucleotide linkages, and wherein the siNA optionally further comprises a terminal phosphate group, such as a 5′-terminal phosphate group. In any of these embodiments, any purine nucleotides present in the antisense region are alternatively 2′-deoxy purine nucleotides (e.g., wherein all purine nucleotides are 2′-deoxy purine nucleotides or alternately a plurality of purine nucleotides are 2′-deoxy purine nucleotides). Also, in any of these embodiments, any purine nucleotides present in the siNA (i.e., purine nucleotides present in the sense and/or antisense region) can alternatively be locked nucleic acid (LNA) nucleotides (e.g., wherein all purine nucleotides are LNA nucleotides or alternately a plurality of purine nucleotides are LNA nucleotides). Also, in any of these embodiments, any purine nucleotides present in the siNA are alternatively 2′-methoxyethyl purine nucleotides (e.g., wherein all purine nucleotides are 2′-methoxyethyl purine nucleotides or alternately a plurality of purine nucleotides are 2′-methoxyethyl purine nucleotides). In another embodiment, any modified nucleotides present in the single stranded siNA molecules of the invention comprise modified nucleotides having properties or characteristics similar to naturally occurring ribonucleotides. For example, the invention features siNA molecules including modified nucleotides having a Northern conformation (e.g., Northern pseudorotation cycle, see for example Saenger, Principles of Nucleic Acid Structure, Springer-Verlag ed., 1984). As such, chemically modified nucleotides present in the single stranded siNA molecules of the invention are preferably resistant to nuclease degradation while at the same time maintaining the capacity to mediate RNAi.

[0142] In one embodiment, a siNA molecule of the invention comprises chemically modified nucleotides or non-nucleotides (e.g., having any of Formulae I-VII, such as 2′-deoxy, 2′-deoxy-2′-fluoro, 4′-thio, 2′-O-trifluoromethyl, 2′-O-ethyl-trifluoromethoxy, 2-′O-difluoromethoxy-ethoxy or 2′-O-methyl nucleotides) at alternating positions within one or more strands or regions of the siNA molecule. For example, such chemical modifications can be introduced at every other position of a RNA based siNA molecule, starting at either the first or second nucleotide from the 3′-end or 5′-end of the siNA. In a non-limiting example, a double stranded siNA molecule of the invention in which each strand of the siNA is 21 nucleotides in length is featured wherein positions 1, 3, 5, 7, 9, 11, 13, 15, 17, 19 and 21 of each strand are chemically modified (e.g., with compounds having any of Formulae I-VII; such as such as 2′-deoxy, 2′-deoxy-2′-fluoro, 4′-thio, 2′-O-trifluoromethyl, 2′-O-ethyl-trifluoromethoxy, 2′-O-difluoromethoxy-ethoxy or 2′-O-methyl nucleotides). In another non-limiting example, a double stranded siNA molecule of the invention in which each strand of the siNA is 21 nucleotides in length is featured wherein positions 2, 4, 6, 8, 10, 12, 14, 16, 18, and 20 of each strand are chemically modified (e.g., with compounds having any of Formulae I-VII, such as such as 2′-deoxy, 2′-deoxy-2′-fluoro, 4′-thio, 2′-O-trifluoromethyl, 2′-O-ethyl-trifluoromethoxy, 2′-O-difluoromethoxy-ethoxy or 2′-O-methyl nucleotides). In one embodiment, one strand of the double stranded siNA molecule comprises chemical modifications at positions 2, 4, 6, 8, 10, 12, 14, 16, 18, and 20 and chemical modifications at positions 1, 3, 5, 7, 9, 11, 13, 15, 17, 19 and 21. Such siNA molecules can further comprise terminal cap moieties and/or backbone modifications as described herein.

[0143] In one embodiment, a siNA molecule of the invention comprises the following features: if purine nucleotides are present at the 5′-end (e.g., at any of terminal nucleotide positions 1, 2, 3, 4, 5, or 6 from the 5′-end) of the antisense strand or antisense region (otherwise referred to as the guide sequence or guide strand) of the siNA molecule then such purine nucleosides are ribonucleotides. In another embodiment, the purine ribonucleotides, when present, are base paired to nucleotides of the sense strand or sense region (otherwise referred to as the passenger strand) of the siNA molecule. Such purine ribonucleotides can be present in a siNA stabilization motif that otherwise comprises modified nucleotides.

[0144] In one embodiment, a siNA molecule of the invention comprises the following features: if pyrimidine nucleotides are present at the 5′-end (e.g., at any of terminal nucleotide positions 1, 2, 3, 4, 5, or 6 from the 5′-end) of the antisense strand or antisense region (otherwise referred to as the guide sequence or guide strand) of the siNA molecule then such pyrimidine nucleosides are ribonucleotides. In another embodiment, the pyrimidine ribonucleotides, when present, are base paired to nucleotides of the sense strand or sense region (otherwise referred to as the passenger strand) of the siNA molecule. Such pyrimidine ribonucleotides can be present in a siNA stabilization motif that otherwise comprises modified nucleotides.

[0145] In one embodiment, a siNA molecule of the invention comprises the following features: if pyrimidine nucleotides are present at the 5′-end (e.g., at any of terminal nucleotide positions 1, 2, 3, 4, 5, or 6 from the 5′-end) of the antisense strand or antisense region (otherwise referred to as the guide sequence or guide strand) of the siNA molecule then such pyrimidine nucleosides are modified nucleotides. In another embodiment, the modified pyrimidine nucleotides, when present, are base paired to nucleotides of the sense strand or sense region (otherwise referred to as the passenger strand) of the siNA molecule. Non-limiting examples of modified pyrimidine nucleotides include those having any of Formulae I-VII, such as such as 2′-deoxy, 2′-deoxy-2′-fluoro, 4′-thio, 2′-O-trifluoromethyl, 2′-O-ethyl-trifluoromethoxy, 2′-O-difluoromethoxy-ethoxy or 2′-O-methyl nucleotides.

[0146] In one embodiment, the invention features a double stranded nucleic acid molecule having structure SI:

```
            B----------------N_{X3}-------------(N)_{X2} B -3′
B (N)_{X1}----------------N_{X4}----------[N]_{X5}- 5′
                                                  SI
```

[0147] wherein each N is independently a nucleotide; each B is a terminal cap moiety that can be present or absent; (N) represents non-base paired or overhanging nucleotides which can be unmodified or chemically modified; [N] represents nucleotide positions wherein any purine nucleotides when present are ribonucleotides; X1 and X2 are independently integers from about 0 to about 4; X3 is an integer from about 9 to about 30; X4 is an integer from about 11 to about 30, provided that the sum of X4 and X5 is between 17-36; X5 is an integer from about 1 to about 6; NX3 is complementary to NX4 and NX5, and
[0148] (a) any pyridmidine nucleotides present in the antisense strand (lower strand) are 2′-deoxy-2′-fluoro nucleotides; any purine nucleotides present in the antisense strand (lower strand) other than the purines nucleotides in the [N] nucleotide positions, are independently 2′-O-methyl nucleotides, 2′-deoxyribonucleotides or a combination of 2′-deoxyribonucleotides and 2′-O-methyl nucleotides;
[0149] (b) any pyrimidine nucleotides present in the sense strand (upper strand) are 2′-deoxy-2′-fluoro nucleotides; any purine nucleotides present in the sense strand (upper strand) are independently 2′-deoxyribonucleotides, 2′-O-methyl nucleotides or a combination of 2′-deoxyribonucleotides and 2′-O-methyl nucleotides; and

[0150] (c) any (N) nucleotides are optionally 2′-O-methyl, 2′-deoxy-2′-fluoro, or deoxyribonucleotides.

[0151] In one embodiment, the invention features a double stranded nucleic acid molecule having structure SII:

```
            B--------------N_{X3}-------------(N)_{X2} B -3′
B (N)_{X1}--------------N_{X4}----------[N]_{X5} -5′
                                              SII
```

[0152] wherein each N is independently a nucleotide; each B is a terminal cap moiety that can be present or absent; (N) represents non-base paired or overhanging nucleotides which can be unmodified or chemically modified; [N] represents nucleotide positions wherein any purine nucleotides when present are ribonucleotides; X1 and X2 are independently integers from about 0 to about 4; X3 is an integer from about 9 to about 30; X4 is an integer from about 11 to about 30, provided that the sum of X4 and X5 is between 17-36; X5 is an integer from about 1 to about 6; NX3 is complementary to NX4 and NX5, and
[0153] (a) any pyridmidine nucleotides present in the antisense strand (lower strand) are 2′-deoxy-2′-fluoro nucleotides; any purine nucleotides present in the antisense strand (lower strand) other than the purines nucleotides in the [N] nucleotide positions, are 2′-O-methyl nucleotides;
[0154] (b) any pyrimidine nucleotides present in the sense strand (upper strand) are ribonucleotides; any purine nucleotides present in the sense strand (upper strand) are ribonucleotides; and
[0155] (c) any (N) nucleotides are optionally 2′-O-methyl, 2′-deoxy-2′-fluoro, or deoxyribonucleotides.

[0156] In one embodiment, the invention features a double stranded nucleic acid molecule having structure SIII:

```
          B---------------N_{X3}-------------(N)_{X2} B -3′
B (N)_{X1}--------------N_{X4}-----------[N]_{X5} -5′
                                            SIII
```

[0157] wherein each N is independently a nucleotide; each B is a terminal cap moiety that can be present or absent; (N) represents non-base paired or overhanging nucleotides which can be unmodified or chemically modified; [N] represents nucleotide positions wherein any purine nucleotides when present are ribonucleotides; X1 and X2 are independently integers from about 0 to about 4; X3 is an integer from about 9 to about 30; X4 is an integer from about 11 to about 30, provided that the sum of X4 and X5 is between 17-36; X5 is an integer from about 1 to about 6; NX3 is complementary to NX4 and NX5, and
[0158] (a) any pyridmidine nucleotides present in the antisense strand (lower strand) are 2′-deoxy-2′-fluoro nucleotides; any purine nucleotides present in the antisense strand (lower strand) other than the purines nucleotides in the [N] nucleotide positions, are 2′-O-methyl nucleotides;
[0159] (b) any pyrimidine nucleotides present in the sense strand (upper strand) are 2′-deoxy-2′-fluoro nucleotides; any purine nucleotides present in the sense strand (upper strand) are ribonucleotides; and
[0160] (c) any (N) nucleotides are optionally 2′-O-methyl, 2′-deoxy-2′-fluoro, or deoxyribonucleotides.

[0161] In one embodiment, the invention features a double stranded nucleic acid molecule having structure SIV:

```
            B--------------N_{X3}-------------(N)_{X2} B -3′
B (N)_{X1}--------------N_{X4}----------[N]_{X5} -5′
                                                    SIV
```

[0162] wherein each N is independently a nucleotide; each B is a terminal cap moiety that can be present or absent; (N) represents non-base paired or overhanging nucleotides which can be unmodified or chemically modified; [N] represents nucleotide positions wherein any purine nucleotides when present are ribonucleotides; X1 and X2 are independently integers from about 0 to about 4; X3 is an integer from about 9 to about 30; X4 is an integer from about 11 to about 30, provided that the sum of X4 and X5 is between 17-36; X5 is an integer from about 1 to about 6; NX3 is complementary to NX4 and NX5, and
[0163] (a) any pyridmidine nucleotides present in the antisense strand (lower strand) are 2′-deoxy-2′-fluoro nucleotides; any purine nucleotides present in the antisense strand (lower strand) other than the purines nucleotides in the [N] nucleotide positions, are 2′-O-methyl nucleotides;
[0164] (b) any pyrimidine nucleotides present in the sense strand (upper strand) are 2′-deoxy-2′-fluoro nucleotides; any purine nucleotides present in the sense strand (upper strand) are deoxyribonucleotides; and
[0165] (c) any (N) nucleotides are optionally 2′-O-methyl, 2′-deoxy-2′-fluoro, or deoxyribonucleotides.

[0166] In one embodiment, the invention features a double stranded nucleic acid molecule having structure SV:

```
            B--------------N_{X3}-------------(N)_{X2} B -3′
B (N)_{X1}--------------N_{X4}----------[N]_{X5} -5′
                                              SV
```

[0167] wherein each N is independently a nucleotide; each B is a terminal cap moiety that can be present or absent; (N) represents non-base paired or overhanging nucleotides which can be unmodified or chemically modified; [N] represents nucleotide positions wherein any purine nucleotides when present are ribonucleotides; X1 and X2 are independently integers from about 0 to about 4; X3 is an integer from about 9 to about 30; X4 is an integer from about 11 to about 30, provided that the sum of X4 and X5 is between 17-36; X5 is an integer from about 1 to about 6; NX3 is complementary to NX4 and NX5, and
[0168] (a) any pyridmidine nucleotides present in the antisense strand (lower strand) are nucleotides having a ribo-like configuration (e.g., Northern or A-form helix configuration); any purine nucleotides present in the antisense strand (lower strand) other than the purines nucleotides in the [N] nucleotide positions, are 2′-O-methyl nucleotides;
[0169] (b) any pyrimidine nucleotides present in the sense strand (upper strand) are nucleotides having a ribo-like configuration (e.g., Northern or A-form helix configuration); any purine nucleotides present in the sense strand (upper strand) are 2′-O-methyl nucleotides; and
[0170] (c) any (N) nucleotides are optionally 2′-O-methyl, 2′-deoxy-2′-fluoro, or deoxyribonucleotides.

[0171] In one embodiment, the invention features a double stranded nucleic acid molecule having structure SVI:

```
            B--------------N_{X3}-------------(N)_{X2} B -3′
B (N)_{X1}--------------N_{X4}----------[N]_{X5} -5′
                                              SVI
```

[0172] wherein each N is independently a nucleotide; each B is a terminal cap moiety that can be present or absent; (N) represents non-base paired or overhanging nucleotides which can be unmodified or chemically modified; [N] represents nucleotide positions comprising sequence that renders the 5′-end of the antisense strand (lower strand) less thermally stable than the 5′-end of the sense strand (upper strand); X1 and X2 are independently integers from about 0 to about 4; X3 is an integer from about 9 to about 30; X4 is an integer from about 11 to about 30, provided that the sum of X4 and X5 is between 17-36; X5 is an integer from about 1 to about 6; NX3 is complementary to NX4 and NX5, and
[0173] (a) any pyridmidine nucleotides present in the antisense strand (lower strand) are 2′-deoxy-2′-fluoro nucleotides; any purine nucleotides present in the antisense strand (lower strand) other than the purines nucleotides in the [N] nucleotide positions, are independently 2′-O-methyl nucleotides, 2′-deoxyribonucleotides or a combination of 2′-deoxyribonucleotides and 2′-O-methyl nucleotides;
[0174] (b) any pyrimidine nucleotides present in the sense strand (upper strand) are 2′-deoxy-2′-fluoro nucleotides; any purine nucleotides present in the sense strand (upper strand) are independently 2′-deoxyribonucleotides, 2′-O-methyl nucleotides or a combination of 2′-deoxyribonucleotides and 2′-O-methyl nucleotides; and

[0175] (c) any (N) nucleotides are optionally 2′-O-methyl, 2′-deoxy-2′-fluoro, or deoxyribonucleotides.

[0176] In one embodiment, the invention features a double stranded nucleic acid molecule having structure SVII:

```
            B--------------N_{X3}-------------(N)_{X2} B -3′
B (N)_{X1}--------------N_{X4}---------- -5′
                                              SVII
```

[0177] wherein each N is independently a nucleotide; each B is a terminal cap moiety that can be present or absent; (N) represents non-base paired or overhanging nucleotides; X1 and X2 are independently integers from about 0 to about 4; X3 is an integer from about 9 to about 30; X4 is an integer from about 11 to about 30; NX3 is complementary to NX4, and any (N) nucleotides are 2′-O-methyl and/or 2′-deoxy-2′-fluoro nucleotides.

[0178] In one embodiment, the invention features a double stranded nucleic acid molecule having structure SVIII:

```
            B--------N_{X7}---[N]_{X6}--N_{X3}--------(N)_{X2} B -3′
                                                /
B (N)_{X1}----------------N_{X4}------------[N]_{X5} -5′
                                              SVIII
```

[0179] wherein each N is independently a nucleotide; each B is a terminal cap moiety that can be present or absent; (N) represents non-base paired or overhanging nucleotides which can be unmodified or chemically modified; [N] represents nucleotide positions comprising sequence that renders the 5′-end of the antisense strand (lower strand) less thermally stable than the 5′-end of the sense strand (upper strand); [N] represents nucleotide positions that are ribonucleotides; X1 and X2 are independently integers from about 0 to about 4; X3 is an integer from about 9 to about 15; X4 is an integer from about 11 to about 30, provided that the sum of X4 and X5 is between 17-36; X5 is an integer from about 1 to about 6; X6 is an integer from about 1 to about 4; X7 is an integer from about 9 to about 15; NX7, NX6, and NX3 are complementary to NX4 and NX5, and
[0180] (a) any pyridmidine nucleotides present in the antisense strand (lower strand) are 2′-deoxy-2′-fluoro nucleotides; any purine nucleotides present in the antisense strand (lower strand) other than the purines nucleotides in the [N] nucleotide positions, are independently 2′-O-methyl nucleotides, 2′-deoxyribonucleotides or a combination of 2′-deoxyribonucleotides and 2′-O-methyl nucleotides;
[0181] (b) any pyrimidine nucleotides present in the sense strand (upper strand) are 2′-deoxy-2′-fluoro nucleotides other than [N] nucleotides; any purine nucleotides present in the sense strand (upper strand) are independently 2′-deoxyribonucleotides, 2′-O-methyl nucleotides or a combination of 2′-deoxyribonucleotides and 2′-O-methyl nucleotides other than [N] nucleotides; and

[0182] (c) any (N) nucleotides are optionally 2′-O-methyl, 2′-deoxy-2′-fluoro, or deoxyribonucleotides.

[0183] In one embodiment, a double stranded nucleic acid molecule having any of structure SI, SII, SIII, SIV, SV, SVI, SVII or SVIII comprises a terminal phosphate group at the 5′-end of the antisense strand or antisense region of the nucleic acid molecule.

[0184] In one embodiment, a double stranded nucleic acid molecule having any of structure SI, SII, SIII, SIV, SV, SVI, SVII or SVIII comprises X5=1, 2, or 3; each X1 and X2=1 or 2; X3=12, 13, 14, 15, 16, 17, 18, 19, 20, 21, 22, 23, 24, 25, 26, 27, 28, 29, or 30, and X4=15, 16, 17, 18, 19, 20, 21, 22, 23, 24, 25, 26, 27, 28, 29, or 30.

[0185] In one embodiment, a double stranded nucleic acid molecule having any of structure SI, SII, SIII, SIV, SV, SVI, SVII or SVIII comprises X5=1; each X1 and X2=2; X3=19, and X4=18.

[0186] In one embodiment, a double stranded nucleic acid molecule having any of structure SI, SII, SIII, SIV, SV, SVI, SVII or SVIII comprises X5=2; each X1 and X2=2; X3=19, and X4=17

[0187] In one embodiment, a double stranded nucleic acid molecule having any of structure SI, SII, SIII, SIV, SV, SVI, SVII or SVIII comprises X5=3; each X1 and X2=2; X3=19, and X4=16.

[0188] In one embodiment, a double stranded nucleic acid molecule having any of structure SI, SII, SIII, SIV, SV, SVI, SVII or SVIII comprises B at the 3′ and 5′ ends of the sense strand or sense region.

[0189] In one embodiment, a double stranded nucleic acid molecule having any of structure SI, SII, SIII, SIV, SV, SVI, SVII or SVIII comprises B at the 3′-end of the antisense strand or antisense region.

[0190] In one embodiment, a double stranded nucleic acid molecule having any of structure SI, SII, SIII, SIV, SV, SVI, SVII or SVIII comprises B at the 3′ and 5′ ends of the sense strand or sense region and B at the 3′-end of the antisense strand or antisense region.

[0191] In one embodiment, a double stranded nucleic acid molecule having any of structure SI, SII, SIII, SIV, SV, SVI, SVII or SVIII further comprises one or more phosphorothioate internucleotide linkages at the first terminal (N) on the 3′end of the sense strand, antisense strand, or both sense strand and antisense strands of the nucleic acid molecule. For example, a double stranded nucleic acid molecule can comprise X1 and/or X2=2 having overhanging nucleotide positions with a phosphorothioate internucleotide linkage, e.g., (NsN) where “s” indicates phosphorothioate.

[0192] In one embodiment, a double stranded nucleic acid molecule having any of structure SI, SII, SIII, SIV, SV, SVI, SVII or SVIII comprises (N) nucleotides that are 2′-O-methyl nucleotides.

[0193] In one embodiment, a double stranded nucleic acid molecule having any of structure SI, SII, SIII, SIV, SV, SVI, SVII or SVIII comprises (N) nucleotides that are 2′-O-methyl nucleotides.

[0194] In one embodiment, a double stranded nucleic acid molecule having any of structure SI, SII, SIII, SIV, SV, SVI, SVII or SVIII comprises (N) nucleotides in the antisense strand (lower strand) that are complementary to nucleotides in a HCV target polynucleotide sequence having complementary to the N and [N] nucleotides of the antisense (lower) strand.

[0195] In one embodiment, a double stranded nucleic acid molecule having any of structure SI, SII, SIII, SIV, SV, SVI, SVII or SVIII comprises (N) nucleotides in the sense strand (upper strand) that comprise nucleotide sequence corresponding a HCV target polynucleotide sequence having complementary to the antisense (lower) strand such that the contiguous (N) and N nucleotide sequence of the sense strand comprises nucleotide sequence of the HCV target nucleic acid sequence.

[0196] In one embodiment, a double stranded nucleic acid molecule having any of structure SVIII comprises B only at the 5′-end of the sense (upper) strand of the double stranded nucleic acid molecule.

[0197] In one embodiment, a double stranded nucleic acid molecule having any of structure SI, SII, SIII, SIV, SV, SVI, SVII or SVIII further comprises an unpaired terminal nucleotide at the 5′-end of the antisense (lower) strand. The unpaired nucleotide is not complementary to the sense (upper) strand. In one embodiment, the unpaired terminal nucleotide is complementary to a HCV target polynucleotide sequence having complementary to the N and [N] nucleotides of the antisense (lower) strand. In another embodiment, the unpaired terminal nucleotide is not complementary to a HCV target polynucleotide sequence having complementary to the N and [N] nucleotides of the antisense (lower) strand.

[0198] In one embodiment, a double stranded nucleic acid molecule having any of structure SVIII comprises X6=1 and X3=10.

[0199] In one embodiment, a double stranded nucleic acid molecule having any of structure SVIII comprises X6=2 and X3=9.

[0200] In one embodiment, the invention features a composition comprising Sirna Compound Nos. 33149/38758 and 31703/38759, formulated as any of formulation LNP-051; LNP-053; LNP-054; LNP-069; LNP-073; LNP-077; LNP-080; LNP-082; LNP-083; LNP-060; LNP-061; LNP-086; LNP-097; LNP-098; LNP-099; LNP-100; LNP-101; LNP-102; LNP-103; or LNP-104 (see Table VI).

[0201] In one embodiment, the invention features a composition comprising Sirna Compound Nos. 33149/38758 and 31703/38759, formulated as formulation LNP-086; (see Tables III and VI).

[0202] In one embodiment, the invention features a composition comprising a first double stranded nucleic and a second double stranded nucleic acid molecule each having a first strand and a second strand that are complementary to each other, wherein the second strand of the first double stranded nucleic acid molecule comprises sequence complementary to HCV sequence having SEQ ID NO: 1444 and the second strand of the second double stranded nucleic acid molecule comprises sequence complementary to HCV sequence having SEQ ID NO: 1417. In one embodiment, the composition further comprises a cationic lipid, a neutral lipid, and a polyethyleneglycol-conjugate. In one embodiment, the composition further comprises a cationic lipid, a neutral lipid, a polyethyleneglycol-conjugate, and a cholesterol. In one embodiment, the composition further comprises a polyethyleneglycol-conjugate, a cholesterol, and a surfactant. In one embodiment, the cationic lipid is selected from the group consisting of CLinDMA, pCLinDMA, eCLinDMA, DMOBA, and DMLBA. In one embodiment, the neutral lipid is selected from the group consisting of DSPC, DOBA, and cholesterol. In one embodiment, the polyethyleneglycol-conjugate is selected from the group consisting of a PEG-dimyristoyl glycerol and PEG-cholesterol. In one embodiment, the PEG is 2KPEG. In one embodiment, the surfactant is selected from the group consisting of palmityl alcohol, stearyl alcohol, oleyl alcohol and linoleyl alcohol. In one embodiment, the cationic lipid is CLinDMA, the neutral lipid is DSPC, the polyethylene glycol conjugate is 2KPEG-DMG, the cholesterol is cholesterol, and the surfactant is linoleyl alcohol. In one embodiment, the CLinDMA, the DSPC, the 2KPEG-DMG, the cholesterol, and the linoleyl alcohol are present in molar ratio of 43:38:10:2:7 respectively. In one embodiment, the first strand and the second strand of the first double stranded nucleic acid molecule comprise SEQ ID NOs: 1796 and 2010 respectively, and the first strand and the second strand of the second double stranded nucleic acid molecule comprise SEQ ID NOs: 1677 and 2011 respectively. In one embodiment, the first strand and the second strand of the first double stranded nucleic acid molecule comprise SEQ ID NOs: 1796 and 2012 respectively, and the first strand and the second strand of the second double stranded nucleic acid molecule comprise SEQ ID NOs: 1677 and 2013 respectively.

[0203] In one embodiment, the invention features a method for modulating the expression of a HCV target gene within a cell comprising: (a) synthesizing a siNA molecule of the invention, which can be chemically-modified or unmodified, wherein one of the siNA strands comprises a sequence complementary to RNA of the HCV target gene; and (b) introducing the siNA molecule into a cell under conditions suitable to modulate (e.g., inhibit) the expression of the HCV target gene in the cell.

[0204] In one embodiment, the invention features a method for modulating the expression of a HCV target gene within a cell comprising: (a) synthesizing a siNA molecule of the invention, which can be chemically-modified or unmodified, wherein one of the siNA strands comprises a sequence complementary to RNA of the HCV target gene and wherein the sense strand sequence of the siNA comprises a sequence identical or substantially similar to the sequence of the HCV target RNA; and (b) introducing the siNA molecule into a cell under conditions suitable to modulate (e.g., inhibit) the expression of the HCV target gene in the cell.

[0205] In another embodiment, the invention features a method for modulating the expression of more than one HCV target gene within a cell comprising: (a) synthesizing siNA molecules of the invention, which can be chemically-modified or unmodified, wherein one of the siNA strands comprises a sequence complementary to RNA of the HCV target genes; and (b) introducing the siNA molecules into a cell under conditions suitable to modulate (e.g., inhibit) the expression of the HCV target genes in the cell.

[0206] In another embodiment, the invention features a method for modulating the expression of two or more HCV target genes within a cell comprising: (a) synthesizing one or more siNA molecules of the invention, which can be chemically-modified or unmodified, wherein the siNA strands comprise sequences complementary to RNA of the HCV target genes and wherein the sense strand sequences of the siNAs comprise sequences identical or substantially similar to the sequences of the HCV target RNAs; and (b) introducing the siNA molecules into a cell under conditions suitable to modulate (e.g., inhibit) the expression of the HCV target genes in the cell.

[0207] In another embodiment, the invention features a method for modulating the expression of more than one HCV target gene within a cell comprising: (a) synthesizing a siNA molecule of the invention, which can be chemically-modified or unmodified, wherein one of the siNA strands comprises a sequence complementary to RNA of the HCV target gene and wherein the sense strand sequence of the siNA comprises a sequence identical or substantially similar to the sequences of the HCV target RNAs; and (b) introducing the siNA molecule into a cell under conditions suitable to modulate (e.g., inhibit) the expression of the HCV target genes in the cell.

[0208] In another embodiment, the invention features a method for modulating the expression of a HCV target gene within a cell comprising: (a) synthesizing a siNA molecule of the invention, which can be chemically-modified or unmodified, wherein one of the siNA strands comprises a sequence complementary to RNA of the HCV target gene, wherein the sense strand sequence of the siNA comprises a sequence identical or substantially similar to the sequences of the HCV target RNA; and (b) introducing the siNA molecule into a cell under conditions suitable to modulate (e.g., inhibit) the expression of the HCV target gene in the cell.

[0209] In one embodiment, siNA molecules of the invention are used as reagents in ex vivo applications. For example, siNA reagents are introduced into tissue or cells that are transplanted into a subject for therapeutic effect. The cells and/or tissue can be derived from an organism or subject that later receives the explant, or can be derived from another organism or subject prior to transplantation. The siNA molecules can be used to modulate the expression of one or more genes in the cells or tissue, such that the cells or tissue obtain a desired phenotype or are able to perform a function when transplanted in vivo. In one embodiment, certain HCV target cells from a patient are extracted. These extracted cells are contacted with siNAs HCV targeting a specific nucleotide sequence within the cells under conditions suitable for uptake of the siNAs by these cells (e.g. using delivery reagents such as cationic lipids, liposomes and the like or using techniques such as electroporation to facilitate the delivery of siNAs into cells). The cells are then reintroduced back into the same patient or other patients.

[0210] In one embodiment, the invention features a method of modulating the expression of a HCV target gene in a tissue explant (e.g., a liver transplant) comprising: (a) synthesizing a siNA molecule of the invention, which can be chemically-modified, wherein one of the siNA strands comprises a sequence complementary to RNA of the HCV target gene; and (b) introducing the siNA molecule into a cell of the tissue explant derived from a particular organism under conditions suitable to modulate (e.g., inhibit) the expression of the HCV target gene in the tissue explant. In another embodiment, the method further comprises introducing the tissue explant back into the organism the tissue was derived from or into another organism under conditions suitable to modulate (e.g., inhibit) the expression of the HCV target gene in that organism.

[0211] In one embodiment, the invention features a method of modulating the expression of a HCV target gene in a tissue explant (e.g., a liver transplant) comprising: (a) synthesizing a siNA molecule of the invention, which can be chemically-modified, wherein one of the siNA strands comprises a sequence complementary to RNA of the HCV target gene and wherein the sense strand sequence of the siNA comprises a sequence identical or substantially similar to the sequence of the HCV target RNA; and (b) introducing the siNA molecule into a cell of the tissue explant derived from a particular organism under conditions suitable to modulate (e.g., inhibit) the expression of the HCV target gene in the tissue explant. In another embodiment, the method further comprises introducing the tissue explant back into the organism the tissue was derived from or into another organism under conditions suitable to modulate (e.g., inhibit) the expression of the HCV target gene in that organism.

[0212] In another embodiment, the invention features a method of modulating the expression of more than one HCV target gene in a tissue explant (e.g., a liver transplant) comprising: (a) synthesizing siNA molecules of the invention, which can be chemically-modified, wherein one of the siNA strands comprises a sequence complementary to RNA of the HCV target genes; and (b) introducing the siNA molecules into a cell of the tissue explant derived from a particular organism under conditions suitable to modulate (e.g., inhibit) the expression of the HCV target genes in the tissue explant. In another embodiment, the method further comprises introducing the tissue explant back into the organism the tissue was derived from or into another organism under conditions suitable to modulate (e.g., inhibit) the expression of the HCV target genes in that organism.

[0213] In one embodiment, the invention features a method of modulating the expression of a HCV target gene in a subject or organism comprising: (a) synthesizing a siNA molecule of the invention, which can be chemically-modified, wherein one of the siNA strands comprises a sequence complementary to RNA of the HCV target gene; and (b) introducing the siNA molecule into the subject or organism under conditions suitable to modulate (e.g., inhibit) the expression of the HCV target gene in the subject or organism. The level of HCV target protein or RNA can be determined using various methods well-known in the art.

[0214] In another embodiment, the invention features a method of modulating the expression of more than one HCV target gene in a subject or organism comprising: (a) synthesizing siNA molecules of the invention, which can be chemically-modified, wherein one of the siNA strands comprises a sequence complementary to RNA of the HCV target genes; and (b) introducing the siNA molecules into the subject or organism under conditions suitable to modulate (e.g., inhibit) the expression of the HCV target genes in the subject or organism. The level of HCV target protein or RNA can be determined as is known in the art.

[0215] In one embodiment, the invention features a method for modulating the expression of a HCV target gene within a cell (e.g., a liver cell) comprising: (a) synthesizing a siNA molecule of the invention, which can be chemically-modified, wherein the siNA comprises a single stranded sequence having complementarity to RNA of the HCV target gene; and (b) introducing the siNA molecule into a cell under conditions suitable to modulate (e.g., inhibit) the expression of the HCV target gene in the cell.

[0216] In another embodiment, the invention features a method for modulating the expression of more than one HCV target gene within a cell (e.g., a liver cell) comprising: (a) synthesizing siNA molecules of the invention, which can be chemically-modified, wherein the siNA comprises a single stranded sequence having complementarity to RNA of the HCV target gene; and (b) contacting the cell in vitro or in vivo with the siNA molecule under conditions suitable to modulate (e.g., inhibit) the expression of the HCV target genes in the cell.

[0217] In one embodiment, the invention features a method of modulating the expression of a HCV target gene in a tissue explant ((e.g., liver or any other organ, tissue or cell as can be transplanted from one organism to another or back to the same organism from which the organ, tissue or cell is derived) comprising: (a) synthesizing a siNA molecule of the invention, which can be chemically-modified, wherein the siNA comprises a single stranded sequence having complementarity to RNA of the HCV target gene; and (b) contacting a cell of the tissue explant derived from a particular subject or organism with the siNA molecule under conditions suitable to modulate (e.g., inhibit) the expression of the HCV target gene in the tissue explant. In another embodiment, the method further comprises introducing the tissue explant back into the subject or organism the tissue was derived from or into another subject or organism under conditions suitable to modulate (e.g., inhibit) the expression of the HCV target gene in that subject or organism.

[0218] In another embodiment, the invention features a method of modulating the expression of more than one HCV target gene in a tissue explant (e.g., liver or any other organ, tissue or cell as can be transplanted from one organism to another or back to the same organism from which the organ, tissue or cell is derived) comprising: (a) synthesizing siNA molecules of the invention, which can be chemically-modified, wherein the siNA comprises a single stranded sequence having complementarity to RNA of the HCV target gene; and (b) introducing the siNA molecules into a cell of the tissue explant derived from a particular subject or organism under conditions suitable to modulate (e.g., inhibit) the expression of the HCV target genes in the tissue explant. In another embodiment, the method further comprises introducing the tissue explant back into the subject or organism the tissue was derived from or into another subject or organism under conditions suitable to modulate (e.g., inhibit) the expression of the HCV target genes in that subject or organism.

[0219] In one embodiment, the invention features a method of modulating the expression of a HCV target gene in a subject or organism comprising: (a) synthesizing a siNA molecule of the invention, which can be chemically-modified, wherein the siNA comprises a single stranded sequence having complementarity to RNA of the HCV target gene; and (b) introducing the siNA molecule into the subject or organism under conditions suitable to modulate (e.g., inhibit) the expression of the HCV target gene in the subject or organism.

[0220] In another embodiment, the invention features a method of modulating the expression of more than one HCV target gene in a subject or organism comprising: (a) synthesizing siNA molecules of the invention, which can be chemically-modified, wherein the siNA comprises a single stranded sequence having complementarity to RNA of the HCV target gene; and (b) introducing the siNA molecules into the subject or organism under conditions suitable to modulate (e.g., inhibit) the expression of the HCV target genes in the subject or organism.

[0221] In one embodiment, the invention features a method of modulating the expression of a HCV target gene in a subject or organism comprising contacting the subject or organism with a siNA molecule of the invention under conditions suitable to modulate (e.g., inhibit) the expression of the HCV target gene in the subject or organism.

[0222] In one embodiment, the invention features a method for treating or preventing a disease, disorder, trait or condition related to gene expression in a subject or organism comprising contacting the subject or organism with a siNA molecule of the invention under conditions suitable to modulate the expression of the HCV target gene in the subject or organism. The reduction of gene expression and thus reduction in the level of the respective protein/RNA relieves, to some extent, the symptoms of the disease, disorder, trait or condition.

[0223] In one embodiment, the invention features a method for treating or preventing HCV infection in a subject or organism comprising contacting the subject or organism with a siNA molecule of the invention under conditions suitable to modulate the expression of the HCV target gene in the subject or organism whereby the treatment or prevention of HCV infection can be achieved. In one embodiment, the invention features contacting the subject or organism with a siNA molecule of the invention via local administration to relevant tissues or cells, such as liver cells and tissues. In one embodiment, the invention features contacting the subject or organism with a siNA molecule of the invention via systemic administration (such as via intravenous or subcutaneous administration of siNA) to relevant tissues or cells, such as tissues or cells involved in the maintenance or development of HCV infection in a subject or organism. The siNA molecule of the invention can be formulated or conjugated as described herein or otherwise known in the art to target appropriate tissues or cells in the subject or organism. The siNA molecule can be combined with other therapeutic treatments and modalities as are known in the art for the treatment of or prevention of HCV infection in a subject or organism.

[0224] In one embodiment, the invention features a method for treating or preventing a liver failure or condition in a subject or organism comprising contacting the subject or organism with a siNA molecule of the invention under conditions suitable to modulate the expression of the HCV target gene in the subject or organism whereby the treatment or prevention of the liver failure or condition can be achieved. In one embodiment, the invention features contacting the subject or organism with a siNA molecule of the invention via local administration to relevant tissues or cells, such as liver cells and tissues involved in liver failure. In one embodiment, the invention features contacting the subject or organism with a siNA molecule of the invention via systemic administration (such as via intravenous or subcutaneous administration of siNA) to relevant tissues or cells, such as tissues or cells involved in the maintenance or development of the liver failure or condition in a subject or organism. The siNA molecule of the invention can be formulated or conjugated as described herein or otherwise known in the art to target appropriate tissues or cells in the subject or organism. The siNA molecule can be combined with other therapeutic treatments and modalities as are known in the art for the treatment of or prevention of liver failures, traits, disorders, or conditions in a subject or organism.

[0225] In one embodiment, the invention features a method for treating or preventing hepatocellular carcinoma in a subject or organism comprising contacting the subject or organism with a siNA molecule of the invention under conditions suitable to modulate the expression of the HCV target gene in the subject or organism whereby the treatment or prevention of hepatocellular carcinoma can be achieved. In one embodiment, the invention features contacting the subject or organism with a siNA molecule of the invention via local administration to relevant tissues or cells, such as liver cells and tissues involved in hepatocellular carcinoma. In one embodiment, the invention features contacting the subject or organism with a siNA molecule of the invention via systemic administration (such as via intravenous or subcutaneous administration of siNA) to relevant tissues or cells, such as tissues or cells involved in the maintenance or development of hepatocellular carcinoma in a subject or organism. The siNA molecule of the invention can be formulated or conjugated as described herein or otherwise known in the art to target appropriate tissues or cells in the subject or organism. The siNA molecule can be combined with other therapeutic treatments and modalities as are known in the art for the treatment of or prevention of hepatocellular carcinoma in a subject or organism.

[0226] In one embodiment, the invention features a method for treating or preventing an cirrhosis, disorder, trait or condition in a subject or organism comprising contacting the subject or organism with a siNA molecule of the invention under conditions suitable to modulate the expression of the HCV target gene in the subject or organism whereby the treatment or prevention of the cirrhosis, disorder, trait or condition can be achieved. In one embodiment, the invention features contacting the subject or organism with a siNA molecule of the invention via local administration to relevant tissues or cells, such as cells and tissues involved in the cirrhosis, disorder, trait or condition. In one embodiment, the invention features contacting the subject or organism with a siNA molecule of the invention via systemic administration (such as via intravenous or subcutaneous administration of siNA) to relevant tissues or cells, such as tissues or cells involved in the maintenance or development of the cirrhosis, disorder, trait or condition in a subject or organism. The siNA molecule of the invention can be formulated or conjugated as described herein or otherwise known in the art to target appropriate tisssues or cells in the subject or organism. The siNA molecule can be combined with other therapeutic treatments and modalities as are known in the art for the treatment of or prevention of cirrhosiss, traits, disorders, or conditions in a subject or organism.

[0227] In one embodiment, the invention features a method for treating or preventing HCV infection in a subject or organism comprising contacting the subject or organism with a siNA molecule of the invention under conditions suitable to modulate (e.g., inhibit) the expression of an inhibitor of HCV gene expression in the subject or organism.

[0228] In one embodiment, the invention features a method for treating or preventing liver failure in a subject or organism comprising contacting the subject or organism with a siNA molecule of the invention under conditions suitable to modulate (e.g., inhibit) the expression of an inhibitor of HCV gene expression in the subject or organism.

[0229] In one embodiment, the invention features a method for treating or preventing hepatocellular carcinoma in a subject or organism comprising contacting the subject or organism with a siNA molecule of the invention under conditions suitable to modulate (e.g., inhibit) the expression of an inhibitor of HCV gene expression in the subject or organism.

[0230] In one embodiment, the invention features a method for treating or preventing cirrhosis in a subject or organism comprising contacting the subject or organism with a siNA molecule of the invention under conditions suitable to modulate (e.g., inhibit) the expression of an inhibitor of HCV gene expression in the subject or organism.

[0231] In one embodiment, the invention features a method for treating or preventing Hepatitis C Virus (HCV) infection in a subject, comprising administering to the subject PEG Interferon in combination with a siNA molecule of the invention; wherein the PEG Interferon and the siNA molecule are administered under conditions suitable for reducing or inhibiting the level of Hepatitis C Virus (HCV) in the subject compared to a subject not treated with the PEG Interferon and the siNA molecule. In one embodiment, a siNA molecule of the invention is formulated as a composition described in U.S. Provisional patent application No. 60/678,531 and in related U.S. Provisional patent application No. 60/703,946, filed Jul. 29, 2005, and U.S. Provisional patent application No. 60/737,024, filed Nov. 15, 2005 (Vargeese et al.), all of which are incorporated by reference herein in their entirety. Such siNA formulations are generally referred to as “lipid nucleic acid particles” (LNP).

[0232] In one embodiment, the invention features a method for treating or preventing Hepatitis C Virus (HCV) infection in a subject, comprising administering to the subject ribavirin in combination with a siNA molecule of the invention; wherein the ribavirin and the siNA are administered under conditions suitable for reducing or inhibiting the level of Hepatitis C Virus (HCV) in the subject compared to a subject not treated with the ribavirin and the siNA molecule. In one embodiment, the siNA molecule or double stranded nucleic acid molecule of the invention is formulated as a composition described in U.S. Provisional patent application No. 60/678,531 and in related U.S. Provisional patent application No. 60/703,946, filed Jul. 29, 2005, and U.S. Provisional patent application No. 60/737,024, filed Nov. 15, 2005 (Vargeese et al.).

[0233] In one embodiment, the invention features a method for treating or preventing Hepatitis C Virus (HCV) infection in a subject, comprising administering to the subject PEG Interferon and ribavirin in combination with a siNA molecule of the invention; wherein the PEG Interferon and ribavirin and the siNA molecule are administered under conditions suitable for reducing or inhibiting the level of Hepatitis C Virus (HCV) in the subject compared to a subject not treated with the PEG Interferon and ribavirin and the siNA molecule. In one embodiment, the siNA molecule or double stranded nucleic acid molecule of the invention is formulated as a composition described in U.S. Provisional patent application No. 60/678,531 and in related U.S. Provisional patent application No. 60/703,946, filed Jul. 29, 2005, and U.S. Provisional patent application No. 60/737,024, filed Nov. 15, 2005 (Vargeese et al.).

[0234] In one embodiment, the invention features a method for treating or preventing Hepatitis C Virus (HCV) infection in a subject, comprising administering to the subject PEG Interferon in combination with a chemically synthesized double stranded nucleic acid molecule; wherein (a) the double stranded nucleic acid molecule comprises a sense strand and an antisense strand; (b) each strand of the double stranded nucleic acid molecule is 15 to 28 nucleotides in length; (c) at least 15 nucleotides of the sense strand are complementary to the antisense strand(d) the antisense strand of the double stranded nucleic acid molecule has complementarity to a Hepatitis C Virus (HCV) HCV target RNA; and wherein the PEG Interferon and the double stranded nucleic acid molecule are administered under conditions suitable for reducing or inhibiting the level of Hepatitis C Virus (HCV) in the subject compared to a subject not treated with the PEG Interferon and the double stranded nucleic acid molecule. In one embodiment, the siNA molecule or double stranded nucleic acid molecule of the invention is formulated as a composition described in U.S. Provisional patent application No. 60/678,531 and in related U.S. Provisional patent application No. 60/703,946, filed Jul. 29, 2005, and U.S. Provisional patent application No. 60/737,024, filed Nov. 15, 2005 (Vargeese et al.).

[0235] In one embodiment, the invention features a method for treating or preventing Hepatitis C Virus (HCV) infection in a subject, comprising administering to the subject ribavirin in combination with a chemically synthesized double stranded nucleic acid molecule; wherein (a) the double stranded nucleic acid molecule comprises a sense strand and an antisense strand; (b) each strand of the double stranded nucleic acid molecule is 15 to 28 nucleotides in length; (c) at least 15 nucleotides of the sense strand are complementary to the antisense strand(d) the antisense strand of the double stranded nucleic acid molecule has complementarity to a Hepatitis C Virus (HCV) HCV target RNA; and wherein the ribavirin and the double stranded nucleic acid molecule are administered under conditions suitable for reducing or inhibiting the level of Hepatitis C Virus (HCV) in the subject compared to a subject not treated with the ribavirin and the double stranded nucleic acid molecule. In one embodiment, the siNA molecule or double stranded nucleic acid molecule of the invention is formulated as a composition described in U.S. Provisional patent application No. 60/678,531 and in related U.S. Provisional patent application No. 60/703,946, filed Jul. 29, 2005, and U.S. Provisional patent application No. 60/737,024, filed Nov. 15, 2005 (Vargeese et al.).

[0236] In one embodiment, the invention features a method for treating or preventing Hepatitis C Virus (HCV) infection in a subject, comprising administering to the subject PEG Interferon and ribavirin in combination with a chemically synthesized double stranded nucleic acid molecule; wherein (a) the double stranded nucleic acid molecule comprises a sense strand and an antisense strand; (b) each strand of the double stranded nucleic acid molecule is 15 to 28 nucleotides in length; (c) at least 15 nucleotides of the sense strand are complementary to the antisense strand(d) the antisense strand of the double stranded nucleic acid molecule has complementarity to a Hepatitis C Virus (HCV) HCV target RNA; and wherein the PEG Interferon and ribavirin and the double stranded nucleic acid molecule are administered under conditions suitable for reducing or inhibiting the level of Hepatitis C Virus (HCV) in the subject compared to a subject not treated with the PEG Interferon and ribavirin and the double stranded nucleic acid molecule. In one embodiment, the siNA molecule or double stranded nucleic acid molecule of the invention is formulated as a composition described in U.S. Provisional patent application No. 60/678,531 and in related U.S. Provisional patent application No. 60/703,946, filed Jul. 29, 2005, and U.S. Provisional patent application No. 60/737,024, filed Nov. 15, 2005 (Vargeese et al.).

[0237] In one embodiment, the invention features a method for treating or preventing Hepatitis C Virus (HCV) infection in a subject, comprising administering to the subject PEG Interferon in combination with a chemically synthesized double stranded nucleic acid molecule; wherein (a) the double stranded nucleic acid molecule comprises a sense strand and an antisense strand; (b) each strand of the double stranded nucleic acid molecule is 15 to 28 nucleotides in length; (c) at least 15 nucleotides of the sense strand are complementary to the antisense strand(d) the antisense strand of the double stranded nucleic acid molecule has complementarity to a Hepatitis C Virus (HCV) HCV target RNA; (e) at least 20% of the internal nucleotides of each strand of the double stranded nucleic acid molecule are modified nucleosides having a chemical modification; and (f) at least two of the chemical modifications are different from each other, and wherein the PEG Interferon and the double stranded nucleic acid molecule are administered under conditions suitable for reducing or inhibiting the level of Hepatitis C Virus (HCV) in the subject compared to a subject not treated with the PEG Interferon and the double stranded nucleic acid molecule. In one embodiment, the siNA molecule or double stranded nucleic acid molecule of the invention is formulated as a composition described in U.S. Provisional patent application No. 60/678,531 and in related U.S. Provisional patent application No. 60/703,946, filed Jul. 29, 2005, and U.S. Provisional patent application No. 60/737,024, filed Nov. 15, 2005 (Vargeese et al.).

[0238] In one embodiment, the invention features a method for treating or preventing Hepatitis C Virus (HCV) infection in a subject, comprising administering to the subject ribavirin in combination with a chemically synthesized double stranded nucleic acid molecule; wherein (a) the double stranded nucleic acid molecule comprises a sense strand and an antisense strand; (b) each strand of the double stranded nucleic acid molecule is 15 to 28 nucleotides in length; (c) at least 15 nucleotides of the sense strand are complementary to the antisense strand (d) the antisense strand of the double stranded nucleic acid molecule has complementarity to a Hepatitis C Virus (HCV) HCV target RNA; (e) at least 20% of the internal nucleotides of each strand of the double stranded nucleic acid molecule are modified nucleosides having a chemical modification; and (f) at least two of the chemical modifications are different from each other, and wherein the ribavirin and the double stranded nucleic acid molecule are administered under conditions suitable for reducing or inhibiting the level of Hepatitis C Virus (HCV) in the subject compared to a subject not treated with the ribavirin and the double stranded nucleic acid molecule. In one embodiment, the siNA molecule or double stranded nucleic acid molecule of the invention is formulated as a composition described in U.S. Provisional patent application No. 60/678,531 and in related U.S. Provisional patent application No. 60/703,946, filed Jul. 29, 2005, and U.S. Provisional patent application No. 60/737,024, filed Nov. 15, 2005 (Vargeese et al.).

[0239] In one embodiment, the invention features a method for treating or preventing Hepatitis C Virus (HCV) infection in a subject, comprising administering to the subject PEG Interferon and ribavirin in combination with a chemically synthesized double stranded nucleic acid molecule; wherein (a) the double stranded nucleic acid molecule comprises a sense strand and an antisense strand; (b) each strand of the double stranded nucleic acid molecule is 15 to 28 nucleotides in length; (c) at least 15 nucleotides of the sense strand are complementary to the antisense strand(d) the antisense strand of the double stranded nucleic acid molecule has complementarity to a Hepatitis C Virus (HCV) HCV target RNA; (e) at least 20% of the internal nucleotides of each strand of the double stranded nucleic acid molecule are modified nucleosides having a chemical modification; and (f) at least two of the chemical modifications are different from each other, and wherein the PEG Interferon and ribavirin and the double stranded nucleic acid molecule are administered under conditions suitable for reducing or inhibiting the level of Hepatitis C Virus (HCV) in the subject compared to a subject not treated with the PEG Interferon and ribavirin and the double stranded nucleic acid molecule. In one embodiment, the siNA molecule or double stranded nucleic acid molecule of the invention is formulated as a composition described in U.S. Provisional patent application No. 60/678,531 and in related U.S. Provisional patent application No. 60/703,946, filed Jul. 29, 2005, and U.S. Provisional patent application No. 60/737,024, filed Nov. 15, 2005 (Vargeese et al.).

[0240] In one embodiment, the invention features a method for treating or preventing Hepatitis C Virus (HCV) infection in a subject, comprising administering to the subject PEG Interferon in combination with a chemically synthesized double stranded nucleic acid molecule; wherein (a) the double stranded nucleic acid molecule comprises a sense strand and an antisense strand; (b) each strand of the double stranded nucleic acid molecule is 15 to 28 nucleotides in length; (c) at least 15 nucleotides of the sense strand are complementary to the antisense strand(d) the antisense strand of the double stranded nucleic acid molecule has complementarity to a Hepatitis C Virus (HCV) HCV target RNA; (e) at least 20% of the internal nucleotides of each strand of the double stranded nucleic acid molecule are modified nucleosides having a sugar modification; and (f) at least two of the sugar modifications are different from each other, and wherein the PEG Interferon and the double stranded nucleic acid molecule are administered under conditions suitable for reducing or inhibiting the level of Hepatitis C Virus (HCV) in the subject compared to a subject not treated with the PEG Interferon and the double stranded nucleic acid molecule. In one embodiment, the siNA molecule or double stranded nucleic acid molecule of the invention is formulated as a composition described in U.S. Provisional patent application No. 60/678,531 and in related U.S. Provisional patent application No. 60/703,946, filed Jul. 29, 2005, and U.S. Provisional patent application No. 60/737,024, filed Nov. 15, 2005 (Vargeese et al.).

[0241] In one embodiment, the invention features a method for treating or preventing Hepatitis C Virus (HCV) infection in a subject, comprising administering to the subject ribavirin in combination with a chemically synthesized double stranded nucleic acid molecule; wherein (a) the double stranded nucleic acid molecule comprises a sense strand and an antisense strand; (b) each strand of the double stranded nucleic acid molecule is 15 to 28 nucleotides in length; (c) at least 15 nucleotides of the sense strand are complementary to the antisense strand(d) the antisense strand of the double stranded nucleic acid molecule has complementarity to a Hepatitis C Virus (HCV) HCV target RNA; (e) at least 20% of the internal nucleotides of each strand of the double stranded nucleic acid molecule are modified nucleosides having a sugar modification; and (f) at least two of the sugar modifications are different from each other, and wherein the ribavirin and the double stranded nucleic acid molecule are administered under conditions suitable for reducing or inhibiting the level of Hepatitis C Virus (HCV) in the subject compared to a subject not treated with the ribavirin and the double stranded nucleic acid molecule. In one embodiment, the siNA molecule or double stranded nucleic acid molecule of the invention is formulated as a composition described in U.S. Provisional patent application No. 60/678,531 and in related U.S. Provisional patent application No. 60/703,946, filed Jul. 29, 2005, and U.S. Provisional patent application No. 60/737,024, filed Nov. 15, 2005 (Vargeese et al.).

[0242] In one embodiment, the invention features a method for treating or preventing Hepatitis C Virus (HCV) infection in a subject, comprising administering to the subject PEG Interferon and ribavirin in combination with a chemically synthesized double stranded nucleic acid molecule; wherein (a) the double stranded nucleic acid molecule comprises a sense strand and an antisense strand; (b) each strand of the double stranded nucleic acid molecule is 15 to 28 nucleotides in length; (c) at least 15 nucleotides of the sense strand are complementary to the antisense strand (d) the antisense strand of the double stranded nucleic acid molecule has complementarity to a Hepatitis C Virus (HCV) HCV target RNA; (e) at least 20% of the internal nucleotides of each strand of the double stranded nucleic acid molecule are modified nucleosides having a sugar modification; and (f) at least two of the sugar modifications are different from each other, and wherein the PEG Interferon and ribavirin and the double stranded nucleic acid molecule are administered under conditions suitable for reducing or inhibiting the level of Hepatitis C Virus (HCV) in the subject compared to a subject not treated with the PEG Interferon and ribavirin and the double stranded nucleic acid molecule. In one embodiment, the siNA molecule or double stranded nucleic acid molecule of the invention is formulated as a composition described in U.S. Provisional patent application No. 60/678,531 and in related U.S. Provisional patent application No. 60/703,946, filed Jul. 29, 2005, and U.S. Provisional patent application No. 60/737,024, filed Nov. 15, 2005 (Vargeese et al.).

[0243] In one embodiment, the invention features a method for treating or preventing a neurologic or neurodegenerative disease, disorder, trait or condition in a subject or organism comprising contacting the subject or organism with a siNA molecule of the invention under conditions suitable to modulate the expression of the HCV target gene in the subject or organism whereby the treatment or prevention of the neurologic or neurodegenerative disease, disorder, trait or condition can be achieved. In one embodiment, the invention features contacting the subject or organism with a siNA molecule of the invention via local administration to relevant tissues or cells, such as cells and tissues involved in the neurologic or neurodegenerative disease, disorder, trait or condition. In one embodiment, the invention features contacting the subject or organism with a siNA molecule of the invention via systemic administration (such as via intravenous or subcutaneous administration of siNA) to relevant tissues or cells, such as tissues or cells involved in the maintenance or development of the neurologic or neurodegenerative disease, disorder, trait or condition in a subject or organism. The siNA molecule of the invention can be formulated or conjugated as described herein or otherwise known in the art to target appropriate tisssues or cells in the subject or organism. The siNA molecule can be combined with other therapeutic treatments and modalities as are known in the art for the treatment of or prevention of neurologic or neurodegenerative diseases, traits, disorders, or conditions in a subject or organism.

[0244] In one embodiment, the invention features a method for treating or preventing a metabolic disease, disorder, trait or condition in a subject or organism comprising contacting the subject or organism with a siNA molecule of the invention under conditions suitable to modulate the expression of the HCV target gene in the subject or organism whereby the treatment or prevention of the metabolic disease, disorder, trait or condition can be achieved. In one embodiment, the invention features contacting the subject or organism with a siNA molecule of the invention via local administration to relevant tissues or cells, such as cells and tissues involved in the metabolic disease, disorder, trait or condition. In one embodiment, the invention features contacting the subject or organism with a siNA molecule of the invention via systemic administration (such as via intravenous or subcutaneous administration of siNA) to relevant tissues or cells, such as tissues or cells involved in the maintenance or development of the metabolic disease, disorder, trait or condition in a subject or organism. The siNA molecule of the invention can be formulated or conjugated as described herein or otherwise known in the art to target appropriate tisssues or cells in the subject or organism. The siNA molecule can be combined with other therapeutic treatments and modalities as are known in the art for the treatment of or prevention of metabolic diseases, traits, disorders, or conditions in a subject or organism.

[0245] In one embodiment, the invention features a composition comprising PEG Interferon and one or more double stranded nucleic acid molecules or siNA molecules of the invention in a phamaceutically acceptable carrier or diluent. In another embodiment, the invention features a composition comprising PEG Interferon, ribavirin, Vertex VX-950, Actilon (CPG 10101), and/or Isatoribine (TLR-7 agonist) and one or more double stranded nucleic acid molecules or siNA molecules of the invention in a phamaceutically acceptable carrier or diluent.

[0246] In one embodiment, a method of treatment of the invention features administration of a double stranded nucleic acid molecule of the invention in combination with one or more other therapeutic modalities, including Interferon (e.g., Interferon-alpha, or PEG interferon such as PEG-Intron, Rebetol, Rebetron, or Pegasys), ribavirin, Vertex VX-950, Actilon (CPG 10101), or Isatoribine (TLR-7 agonist). In another embodiment, such combination therapies can be utilized in any of the embodiments herein.

[0247] In any of the methods of treatment of the invention, the siNA can be administered to the subject as a course of treatment, for example administration at various time intervals, such as once per day over the course of treatment, once every two days over the course of treatment, once every three days over the course of treatment, once every four days over the course of treatment, once every five days over the course of treatment, once every six days over the course of treatment, once per week over the course of treatment, once every other week over the course of treatment, once per month over the course of treatment, etc. In one embodiment, the course of treatment is once every 1, 2, 3, 4, 5, 6, 7, 8, 9, or 10 weeks. In one embodiment, the course of treatment is from about one to about 52 weeks or longer (e.g., indefinitely). In one embodiment, the course of treatment is from about one to about 48 months or longer (e.g., indefinitely).

[0248] In one embodiment, a course of treatment involves an initial course of treatment, such as once every 1, 2, 3, 4, 5, 6, 7, 8, 9, 10 or more weeks for a fixed interval (e.g., 1×, 2×, 3×, 4×, 5×, 6×, 7×, 8×, 9×, 10×or more) followed by a maintenance course of treatment, such as once every 4, 6, 8, 10, 15, 20, 25, 30, 35, 40, or more weeks for an additional fixed interval (e.g., 1×, 2×, 3×, 4×, 5×, 6×, 7×, 8×, 9×, 10×or more).

[0249] In any of the methods of treatment of the invention, the siNA can be administered to the subject systemically as described herein or otherwise known in the art, either alone as a monotherapy or in combination with additional therapies described herein or as are known in the art. Systemic administration can include, for example, intravenous, subcutaneous, intramuscular, catheterization, nasopharangeal, transdermal, or gastrointestinal administration as is generally known in the art.

[0250] In one embodiment, in any of the methods of treatment or prevention of the invention, the siNA can be administered to the subject locally or to local tissues as described herein or otherwise known in the art, either alone as a monotherapy or in combination with additional therapies as are known in the art. Local administration can include, for example, catheterization, implantation, direct injection, dermal/transdermal application, stenting, ear/eye drops, or portal vein administration to relevant tissues, or any other local administration technique, method or procedure, as is generally known in the art.

[0251] In another embodiment, the invention features a method of modulating the expression of more than one HCV target gene in a subject or organism comprising contacting the subject or organism with one or more siNA molecules of the invention under conditions suitable to modulate (e.g., inhibit) the expression of the HCV target genes in the subject or organism.

[0252] The siNA molecules of the invention can be designed to down regulate or inhibit target gene expression through RNAi targeting of a variety of nucleic acid molecules. In one embodiment, the siNA molecules of the invention are used to target various DNA corresponding to a target gene, for example via heterochromatic silencing or transcriptional inhibition. In one embodiment, the siNA molecules of the invention are used to target various RNAs corresponding to a target gene, for example via RNA target cleavage or translational inhibition. Non-limiting examples of such RNAs include messenger RNA (mRNA), non-coding RNA (ncRNA) or regulatory elements (see for example Mattick, 2005, Science, 309, 1527-1528 and Claverie, 2005, Science, 309, 1529-1530) which includes miRNA and other small RNAs, alternate RNA splice variants of target gene(s), post-transcriptionally modified RNA of target gene(s), pre-mRNA of target gene(s), and/or RNA templates. If alternate splicing produces a family of transcripts that are distinguished by usage of appropriate exons, the instant invention can be used to inhibit gene expression through the appropriate exons to specifically inhibit or to distinguish among the functions of gene family members. For example, a protein that contains an alternatively spliced transmembrane domain can be expressed in both membrane bound and secreted forms. Use of the invention to target the exon containing the transmembrane domain can be used to determine the functional consequences of pharmaceutical targeting of membrane bound as opposed to the secreted form of the protein. Non-limiting examples of applications of the invention relating to targeting these RNA molecules include therapeutic pharmaceutical applications, cosmetic applications, veterinary applications, pharmaceutical discovery applications, molecular diagnostic and gene function applications, and gene mapping, for example using single nucleotide polymorphism mapping with siNA molecules of the invention. Such applications can be implemented using known gene sequences or from partial sequences available from an expressed sequence tag (EST).

[0253] In another embodiment, the siNA molecules of the invention are used to target conserved sequences corresponding to a gene family or gene families such as HCV family genes (e.g., all known HCV strains, groups of related HCV strains, or groups of divergent HCV strains). As such, siNA molecules targeting multiple HCV targets can provide increased therapeutic effect. In addition, siNA can be used to characterize pathways of gene function in a variety of applications. For example, the present invention can be used to inhibit the activity of target gene(s) in a pathway to determine the function of uncharacterized gene(s) in gene function analysis, mRNA function analysis, or translational analysis. The invention can be used to determine potential target gene pathways involved in various diseases and conditions toward pharmaceutical development. The invention can be used to understand pathways of gene expression involved in, for example proliferative diseases; disorders and conditions.

[0254] In addition, siNA can be used to characterize pathways of gene function in a variety of applications. For example, the present invention can be used to inhibit the activity of target gene(s) in a pathway to determine the function of uncharacterized gene(s) in gene function analysis, mRNA function analysis, or translational analysis. The invention can be used to determine potential target gene pathways involved in various diseases and conditions toward pharmaceutical development. The invention can be used to understand pathways of gene expression involved in, for example, the progression and/or maintenance of hearing loss, deafness, tinnitus, movement or balance disorders, and any other diseases, traits, and conditions associated with target gene expression or activity in a subject or organism.

[0255] In one embodiment, siNA molecule(s) and/or methods of the invention are used to down regulate the expression of gene(s) that encode RNA referred to by Genbank Accession, for example, target genes encoding RNA sequence(s) referred to herein by Genbank Accession number, for example, Genbank Accession Nos. shown herein (e.g. in Table I) and in U.S. Ser. No. 10/923,536 and U.S. Ser. No. 10/923,536, both incorporated by reference herein.

[0256] In one embodiment, the invention features a method comprising: (a) generating a library of siNA constructs having a predetermined complexity; and (b) assaying the siNA constructs of (a) above, under conditions suitable to determine RNAi target sites within the target RNA sequence. In one embodiment, the siNA molecules of (a) have strands of a fixed length, for example, about 23 nucleotides in length. In another embodiment, the siNA molecules of (a) are of differing length, for example having strands of about 15 to about 30 (e.g., about 15, 16, 17, 18, 19, 20, 21, 22, 23, 24, 25, 26, 27, 28, 29, or 30) nucleotides in length. In one embodiment, the assay can comprise a reconstituted in vitro siNA assay as described herein. In another embodiment, the assay can comprise a cell culture system in which target RNA is expressed. In another embodiment, fragments of target RNA are analyzed for detectable levels of cleavage, for example by gel electrophoresis, northern blot analysis, or RNAse protection assays, to determine the most suitable target site(s) within the target RNA sequence. The target RNA sequence can be obtained as is known in the art, for example, by cloning and/or transcription for in vitro systems, and by cellular expression in in vivo systems.

[0257] In one embodiment, the invention features a method comprising: (a) generating a randomized library of siNA constructs having a predetermined complexity, such as of 4^{N}, where N represents the number of base paired nucleotides in each of the siNA construct strands (eg. for a siNA construct having 21 nucleotide sense and antisense strands with 19 base pairs, the complexity would be 4¹⁹); and (b) assaying the siNA constructs of (a) above, under conditions suitable to determine RNAi target sites within the target target RNA sequence. In another embodiment, the siNA molecules of (a) have strands of a fixed length, for example about 23 nucleotides in length. In yet another embodiment, the siNA molecules of (a) are of differing length, for example having strands of about 15 to about 30 (e.g., about 15, 16, 17, 18, 19, 20, 21, 22, 23, 24, 25, 26, 27, 28, 29, or 30) nucleotides in length. In one embodiment, the assay can comprise a reconstituted in vitro siNA assay as described in Example 6 herein. In another embodiment, the assay can comprise a cell culture system in which target RNA is expressed. In another embodiment, fragments of target RNA are analyzed for detectable levels of cleavage, for example, by gel electrophoresis, northern blot analysis, or RNAse protection assays, to determine the most suitable target site(s) within the target target RNA sequence. The target target RNA sequence can be obtained as is known in the art, for example, by cloning and/or transcription for in vitro systems, and by cellular expression in in vivo systems.

[0258] In another embodiment, the invention features a method comprising: (a) analyzing the sequence of a RNA target encoded by a target gene; (b) synthesizing one or more sets of siNA molecules having sequence complementary to one or more regions of the RNA of (a); and (c) assaying the siNA molecules of (b) under conditions suitable to determine RNAi targets within the target RNA sequence. In one embodiment, the siNA molecules of (b) have strands of a fixed length, for example about 23 nucleotides in length. In another embodiment, the siNA molecules of (b) are of differing length, for example having strands of about 15 to about 30 (e.g., about 15, 16, 17, 18, 19, 20, 21, 22, 23, 24, 25, 26, 27, 28, 29, or 30) nucleotides in length. In one embodiment, the assay can comprise a reconstituted in vitro siNA assay as described herein. In another embodiment, the assay can comprise a cell culture system in which target RNA is expressed. Fragments of target RNA are analyzed for detectable levels of cleavage, for example by gel electrophoresis, northern blot analysis, or RNAse protection assays, to determine the most suitable target site(s) within the target RNA sequence. The target RNA sequence can be obtained as is known in the art, for example, by cloning and/or transcription for in vitro systems, and by expression in in vivo systems.

[0259] By “target site” is meant a sequence within a target RNA that is “targeted” for cleavage mediated by a siNA construct which contains sequences within its antisense region that are complementary to the target sequence.

[0260] By “detectable level of cleavage” is meant cleavage of target RNA (and formation of cleaved product RNAs) to an extent sufficient to discern cleavage products above the background of RNAs produced by random degradation of the target RNA. Production of cleavage products from 1-5% of the target RNA is sufficient to detect above the background for most methods of detection.

[0261] In one embodiment, the invention features a composition comprising a siNA molecule of the invention, which can be chemically-modified, in a pharmaceutically acceptable carrier or diluent. In another embodiment, the invention features a pharmaceutical composition comprising siNA molecules of the invention, which can be chemically-modified, targeting one or more genes in a pharmaceutically acceptable carrier or diluent. In another embodiment, the invention features a method for diagnosing a disease, trait, or condition in a subject comprising administering to the subject a composition of the invention under conditions suitable for the diagnosis of the disease, trait, or condition in the subject. In another embodiment, the invention features a method for treating or preventing a disease, trait, or condition, such as hearing loss, deafness, tinnitus, and/or motion and balance disorders in a subject, comprising administering to the subject a composition of the invention under conditions suitable for the treatment or prevention of the disease, trait, or condition in the subject, alone or in conjunction with one or more other therapeutic compounds.

[0262] In another embodiment, the invention features a method for validating a target gene target, comprising: (a) synthesizing a siNA molecule of the invention, which can be chemically-modified, wherein one of the siNA strands includes a sequence complementary to RNA of a target gene; (b) introducing the siNA molecule into a cell, tissue, subject, or organism under conditions suitable for modulating expression of the target gene in the cell, tissue, subject, or organism; and (c) determining the function of the gene by assaying for any phenotypic change in the cell, tissue, subject, or organism.

[0263] In another embodiment, the invention features a method for validating a target comprising: (a) synthesizing a siNA molecule of the invention, which can be chemically-modified, wherein one of the siNA strands includes a sequence complementary to RNA of a target gene; (b) introducing the siNA molecule into a biological system under conditions suitable for modulating expression of the target gene in the biological system; and (c) determining the function of the gene by assaying for any phenotypic change in the biological system.

[0264] By “biological system” is meant, material, in a purified or unpurified form, from biological sources, including but not limited to human or animal, wherein the system comprises the components required for RNAi activity. The term “biological system” includes, for example, a cell, tissue, subject, or organism, or extract thereof. The term biological system also includes reconstituted RNAi systems that can be used in an in vitro setting.

[0265] By “phenotypic change” is meant any detectable change to a cell that occurs in response to contact or treatment with a nucleic acid molecule of the invention (e.g., siNA). Such detectable changes include, but are not limited to, changes in shape, size, proliferation, motility, protein expression or RNA expression or other physical or chemical changes as can be assayed by methods known in the art. The detectable change can also include expression of reporter genes/molecules such as Green Florescent Protein (GFP) or various tags that are used to identify an expressed protein or any other cellular component that can be assayed.

[0266] In one embodiment, the invention features a kit containing a siNA molecule of the invention, which can be chemically-modified, that can be used to modulate the expression of a target gene in a biological system, including, for example, in a cell, tissue, subject, or organism. In another embodiment, the invention features a kit containing more than one siNA molecule of the invention, which can be chemically-modified, that can be used to modulate the expression of more than one target gene in a biological system, including, for example, in a cell, tissue, subject, or organism.

[0267] In one embodiment, the invention features a cell containing one or more siNA molecules of the invention, which can be chemically-modified. In another embodiment, the cell containing a siNA molecule of the invention is a mammalian cell. In yet another embodiment, the cell containing a siNA molecule of the invention is a human cell.

[0268] In one embodiment, the synthesis of a siNA molecule of the invention, which can be chemically-modified, comprises: (a) synthesis of two complementary strands of the siNA molecule; (b) annealing the two complementary strands together under conditions suitable to obtain a double-stranded siNA molecule. In another embodiment, synthesis of the two complementary strands of the siNA molecule is by solid phase oligonucleotide synthesis. In yet another embodiment, synthesis of the two complementary strands of the siNA molecule is by solid phase tandem oligonucleotide synthesis.

[0269] In one embodiment, the invention features a method for synthesizing a siNA duplex molecule comprising: (a) synthesizing a first oligonucleotide sequence strand of the siNA molecule, wherein the first oligonucleotide sequence strand comprises a cleavable linker molecule that can be used as a scaffold for the synthesis of the second oligonucleotide sequence strand of the siNA; (b) synthesizing the second oligonucleotide sequence strand of siNA on the scaffold of the first oligonucleotide sequence strand, wherein the second oligonucleotide sequence strand further comprises a chemical moiety than can be used to purify the siNA duplex; (c) cleaving the linker molecule of (a) under conditions suitable for the two siNA oligonucleotide strands to hybridize and form a stable duplex; and (d) purifying the siNA duplex utilizing the chemical moiety of the second oligonucleotide sequence strand. In one embodiment, cleavage of the linker molecule in (c) above takes place during deprotection of the oligonucleotide, for example, under hydrolysis conditions using an alkylamine base such as methylamine. In one embodiment, the method of synthesis comprises solid phase synthesis on a solid support such as controlled pore glass (CPG) or polystyrene, wherein the first sequence of (a) is synthesized on a cleavable linker, such as a succinyl linker, using the solid support as a scaffold. The cleavable linker in (a) used as a scaffold for synthesizing the second strand can comprise similar reactivity as the solid support derivatized linker, such that cleavage of the solid support derivatized linker and the cleavable linker of (a) takes place concomitantly. In another embodiment, the chemical moiety of (b) that can be used to isolate the attached oligonucleotide sequence comprises a trityl group, for example a dimethoxytrityl group, which can be employed in a trityl-on synthesis strategy as described herein. In yet another embodiment, the chemical moiety, such as a dimethoxytrityl group, is removed during purification, for example, using acidic conditions.

[0270] In a further embodiment, the method for siNA synthesis is a solution phase synthesis or hybrid phase synthesis wherein both strands of the siNA duplex are synthesized in tandem using a cleavable linker attached to the first sequence which acts a scaffold for synthesis of the second sequence. Cleavage of the linker under conditions suitable for hybridization of the separate siNA sequence strands results in formation of the double-stranded siNA molecule.

[0271] In another embodiment, the invention features a method for synthesizing a siNA duplex molecule comprising: (a) synthesizing one oligonucleotide sequence strand of the siNA molecule, wherein the sequence comprises a cleavable linker molecule that can be used as a scaffold for the synthesis of another oligonucleotide sequence; (b) synthesizing a second oligonucleotide sequence having complementarity to the first sequence strand on the scaffold of (a), wherein the second sequence comprises the other strand of the double-stranded siNA molecule and wherein the second sequence further comprises a chemical moiety than can be used to isolate the attached oligonucleotide sequence; (c) purifying the product of (b) utilizing the chemical moiety of the second oligonucleotide sequence strand under conditions suitable for isolating the full-length sequence comprising both siNA oligonucleotide strands connected by the cleavable linker and under conditions suitable for the two siNA oligonucleotide strands to hybridize and form a stable duplex. In one embodiment, cleavage of the linker molecule in (c) above takes place during deprotection of the oligonucleotide, for example, under hydrolysis conditions. In another embodiment, cleavage of the linker molecule in (c) above takes place after deprotection of the oligonucleotide. In another embodiment, the method of synthesis comprises solid phase synthesis on a solid support such as controlled pore glass (CPG) or polystyrene, wherein the first sequence of (a) is synthesized on a cleavable linker, such as a succinyl linker, using the solid support as a scaffold. The cleavable linker in (a) used as a scaffold for synthesizing the second strand can comprise similar reactivity or differing reactivity as the solid support derivatized linker, such that cleavage of the solid support derivatized linker and the cleavable linker of (a) takes place either concomitantly or sequentially. In one embodiment, the chemical moiety of (b) that can be used to isolate the attached oligonucleotide sequence comprises a trityl group, for example a dimethoxytrityl group.

[0272] In another embodiment, the invention features a method for making a double-stranded siNA molecule in a single synthetic process comprising: (a) synthesizing an oligonucleotide having a first and a second sequence, wherein the first sequence is complementary to the second sequence, and the first oligonucleotide sequence is linked to the second sequence via a cleavable linker, and wherein a terminal 5′-protecting group, for example, a 5′-O-dimethoxytrityl group (5′-O-DMT) remains on the oligonucleotide having the second sequence; (b) deprotecting the oligonucleotide whereby the deprotection results in the cleavage of the linker joining the two oligonucleotide sequences; and (c) purifying the product of (b) under conditions suitable for isolating the double-stranded siNA molecule, for example using a trityl-on synthesis strategy as described herein.

[0273] In another embodiment, the method of synthesis of siNA molecules of the invention comprises the teachings of Scaringe et al., U.S. Pat. Nos. 5,889,136; 6,008,400; and 6,111,086, incorporated by reference herein in their entirety.

[0274] In one embodiment, the invention features siNA constructs that mediate RNAi against a target polynucleotide (e.g., RNA or DNA target), wherein the siNA construct comprises one or more chemical modifications, for example, one or more chemical modifications having any of Formulae I-VII or any combination thereof that increases the nuclease resistance of the siNA construct.

[0275] In another embodiment, the invention features a method for generating siNA molecules with increased nuclease resistance comprising (a) introducing nucleotides having any of Formula I-VII or any combination thereof into a siNA molecule, and (b) assaying the siNA molecule of step (a) under conditions suitable for isolating siNA molecules having increased nuclease resistance.

[0276] In another embodiment, the invention features a method for generating siNA molecules with improved toxicologic profiles (e.g., having attenuated or no immunstimulatory properties) comprising (a) introducing nucleotides having any of Formula I-VII (e.g., siNA motifs referred to in Table IV) or any combination thereof into a siNA molecule, and (b) assaying the siNA molecule of step (a) under conditions suitable for isolating siNA molecules having improved toxicologic profiles.

[0277] In another embodiment, the invention features a method for generating siNA formulations with improved toxicologic profiles (e.g., having attenuated or no immunstimulatory properties) comprising (a) generating a siNA formulation comprising a siNA molecule of the invention and a delivery vehicle or delivery particle as described herein or as otherwise known in the art, and (b) assaying the siNA formualtion of step (a) under conditions suitable for isolating siNA formulations having improved toxicologic profiles.

[0278] In another embodiment, the invention features a method for generating siNA molecules that do not stimulate an interferon response (e.g., no interferon response or attenuated interferon response) in a cell, subject, or organism, comprising (a) introducing nucleotides having any of Formula I-VII (e.g., siNA motifs referred to in Table IV) or any combination thereof into a siNA molecule, and (b) assaying the siNA molecule of step (a) under conditions suitable for isolating siNA molecules that do not stimulate an interferon response.

[0279] In another embodiment, the invention features a method for generating siNA formulations that do not stimulate an interferon response (e.g., no interferon response or attenuated interferon response) in a cell, subject, or organism, comprising (a) generating a siNA formulation comprising a siNA molecule of the invention and a delivery vehicle or delivery particle as described herein or as otherwise known in the art, and (b) assaying the siNA formulations of step (a) under conditions suitable for isolating siNA formulations that do not stimulate an interferon response. In one embodiment, the interferon comprises interferon alpha.

[0280] In another embodiment, the invention features a method for generating siNA molecules that do not stimulate an inflammatory or proinflammatory cytokine response (e.g., no cytokine response or attenuated cytokine response) in a cell, subject, or organism, comprising (a) introducing nucleotides having any of Formula I-VII (e.g., siNA motifs referred to in Table IV) or any combination thereof into a siNA molecule, and (b) assaying the siNA molecule of step (a) under conditions suitable for isolating siNA molecules that do not stimulate a cytokine response. In one embodiment, the cytokine comprises an interleukin such as interleukin-6 (IL-6) and/or tumor necrosis alpha (TNF-α).

[0281] In another embodiment, the invention features a method for generating siNA formulations that do not stimulate an inflammatory or proinflammatory cytokine response (e.g., no cytokine response or attenuated cytokine response) in a cell, subject, or organism, comprising (a) generating a siNA formulation comprising a siNA molecule of the invention and a delivery vehicle or delivery particle as described herein or as otherwise known in the art, and (b) assaying the siNA formulations of step (a) under conditions suitable for isolating siNA formulations that do not stimulate a cytokine response. In one embodiment, the cytokine comprises an interleukin such as interleukin-6 (IL-6) and/or tumor necrosis alpha (TNF-α).

[0282] In another embodiment, the invention features a method for generating siNA molecules that do not stimulate Toll-like Receptor (TLR) response (e.g., no TLR response or attenuated TLR response) in a cell, subject, or organism, comprising (a) introducing nucleotides having any of Formula I-VII (e.g., siNA motifs referred to in Table IV) or any combination thereof into a siNA molecule, and (b) assaying the siNA molecule of step (a) under conditions suitable for isolating siNA molecules that do not stimulate a TLR response. In one embodiment, the TLR comprises TLR3, TLR7, TLR8 and/or TLR9.

[0283] In another embodiment, the invention features a method for generating siNA formulations that do not stimulate a Toll-like Receptor (TLR) response (e.g., no TLR response or attenuated TLR response) in a cell, subject, or organism, comprising (a) generating a siNA formulation comprising a siNA molecule of the invention and a delivery vehicle or delivery particle as described herein or as otherwise known in the art, and (b) assaying the siNA formulations of step (a) under conditions suitable for isolating siNA formulations that do not stimulate a TLR response. In one embodiment, the TLR comprises TLR3, TLR7, TLR8 and/or TLR9.

[0284] In one embodiment, the invention features a chemically synthesized double stranded short interfering nucleic acid (siNA) molecule that directs cleavage of a target RNA via RNA interference (RNAi), wherein: (a) each strand of said siNA molecule is about 18 to about 38 nucleotides in length; (b) one strand of said siNA molecule comprises nucleotide sequence having sufficient complementarity to said target RNA for the siNA molecule to direct cleavage of the target RNA via RNA interference; and (c) wherein the nucleotide positions within said siNA molecule are chemically modified to reduce the immunostimulatory properties of the siNA molecule to a level below that of a corresponding unmodified siRNA molecule. Such siNA molecules are said to have an improved toxicologic profile compared to an unmodified or minimally modified siNA.

[0285] By “improved toxicologic profile”, is meant that the chemically modified or formulated siNA construct exhibits decreased toxicity in a cell, subject, or organism compared to an unmodified or unformulated siNA, or siNA molecule having fewer modifications or modifications that are less effective in imparting improved toxicology. In a non-limiting example, siNA molecules and formulations with improved toxicologic profiles are associated with reduced immunostimulatory properties, such as a reduced, decreased or attenuated immunostimulatory response in a cell, subject, or organism compared to an unmodified or unformulated siNA, or siNA molecule having fewer modifications or modifications that are less effective in imparting improved toxicology. Such an improved toxicologic profile is characterized by abrogated or reduced immunostimulation, such as reduction or abrogation of induction of interferons (e.g., interferon alpha), inflammatory cytokines (e.g., interleukins such as IL-6, and/or TNF-αalpha), and/or toll like receptors (e.g., TLR-3, TLR-7, TLR-8, and/or TLR-9). In one embodiment, a siNA molecule or formulation with an improved toxicological profile comprises no ribonucleotides. In one embodiment, a siNA molecule or formulation with an improved toxicological profile comprises less than 5 ribonucleotides (e.g., 1, 2, 3, or 4 ribonucleotides). In one embodiment, a siNA molecule or formulation with an improved toxicological profile comprises Stab 7, Stab 8, Stab 11, Stab 12, Stab 13, Stab 16, Stab 17, Stab 18, Stab 19, Stab 20, Stab 23, Stab 24, Stab 25, Stab 26, Stab 27, Stab 28, Stab 29, Stab 30, Stab 31, Stab 32, Stab 33, Stab 34 or any combination thereof (see Table IV). Herein, numeric Stab chemistries include both 2′-fluoro and 2′-OCF3 versions of the chemistries shown in Table IV. For example, “Stab 7/8” refers to both Stab 7/8 and Stab 7F/8F etc. In one embodiment, a siNA molecule or formulation with an improved toxicological profile comprises a siNA molecule of the invention and a formulation as described in U.S. Patent Application Publication No. 20030077829, incorporated by reference herein in its entirety including the drawings.

[0286] In one embodiment, the level of immunostimulatory response associated with a given siNA molecule can be measured as is described herein or as is otherwise known in the art, for example by determining the level of PKR/interferon response, proliferation, B-cell activation, and/or cytokine production in assays to quantitate the immunostimulatory response of particular siNA molecules (see, for example, Leifer et al., 2003, J Immunother. 26, 313-9; and U.S. Pat. No. 5,968,909, incorporated in its entirety by reference). In one embodiment, the reduced immunostimulatory response is between about 10% and about 100% compared to an unmodified or minimally modified siRNA molecule, e.g., about 10%, 20%, 30%, 40%, 50%, 60%, 70%, 80%, 90% or 100% reduced immunostimulatory response. In one embodiment, the immunostimulatory response associated with a siNA molecule can be modulated by the degree of chemical modification. For example, a siNA molecule having between about 10% and about 100%, e.g., about 10%, 20%, 30%, 40%, 50%, 60%, 70%, 80%, 90% or 100% of the nucleotide positions in the siNA molecule modified can be selected to have a corresponding degree of immunostimulatory properties as described herein.

[0287] In one embodiment, the degree of reduced immunostimulatory response is selected for optimized RNAi activity. For example, retaining a certain degree of immunostimulation can be preferred to treat viral infection, where less than 100% reduction in immunostimulation may be preferred for maximal antiviral activity (e.g., about 10%, 20%, 30%, 40%, 50%, 60%, 70%, 80%, or 90% reduction in immunostimulation) whereas the inhibition of expression of an endogenous gene target may be preferred with siNA molecules that posess minimal immunostimulatory properties to prevent non-specific toxicity or off target effects (e.g., about 90% to about 100% reduction in immunostimulation).

[0288] In one embodiment, the invention features a chemically synthesized double stranded siNA molecule that directs cleavage of a target RNA via RNA interference (RNAi), wherein (a) each strand of said siNA molecule is about 18 to about 38 nucleotides in length; (b) one strand of said siNA molecule comprises nucleotide sequence having sufficient complementarity to said target RNA for the siNA molecule to direct cleavage of the target RNA via RNA interference; and (c) wherein one or more nucleotides of said siNA molecule are chemically modified to reduce the immunostimulatory properties of the siNA molecule to a level below that of a corresponding unmodified siNA molecule. In one embodiment, each starnd comprises at least about 18 nucleotides that are complementary to the nucleotides of the other strand.

[0289] In another embodiment, the siNA molecule comprising modified nucleotides to reduce the immunostimulatory properties of the siNA molecule comprises an antisense region having nucleotide sequence that is complemetary to a nucleotide sequence of a target gene or a protion thereof and further comprises a sense region, wherein said sense region comprises a nucleotide sequence substantially similar to the nucleotide sequence of said target gene or protion thereof. In one embodiment thereof, the antisense region and the sense region comprise about 18 to about 38 nucleotides, wherein said antisense region comprises at least about 18 nucleotides that are complementary to nucleotides of the sense region. In one embodiment thereof, the pyrimidine nucleotides in the sense region are 2′-O-methyl pyrimidine nucleotides. In another embodiment thereof, the purine nucleotides in the sense region are 2′-deoxy purine nucleotides. In yet another embodiment thereof, the pyrimidine nucleotides present in the sense region are 2′-deoxy-2′-fluoro pyrimidine nucleotides. In another embodiment thereof, the pyrimidine nucleotides of said antisense region are 2′-deoxy-2′-fluoro pyrimidine nucleotides. In yet another embodiment thereof, the purine nucleotides of said antisense region are 2′-O-methyl purine nucleotides. In still another embodiment thereof, the purine nucleotides present in said antisense region comprise 2′-deoxypurine nucleotides. In another embodiment, the antisense region comprises a phosphorothioate internucleotide linkage at the 3′ end of said antisense region. In another embodiment, the antisense region comprises a glyceryl modification at a 3′ end of said antisense region.

[0290] In other embodiments, the siNA molecule comprisisng modified nucleotides to reduce the immunostimulatory properties of the siNA molecule can comprise any of the structural features of siNA molecules described herein. In other embodiments, the siNA molecule comprising modified nucleotides to reduce the immunostimulatory properties of the siNA molecule can comprise any of the chemical modifications of siNA molecules described herein.

[0291] In one embodiment, the invention features a method for generating a chemically synthesized double stranded siNA molecule having chemically modified nucleotides to reduce the immunostimulatory properties of the siNA molecule, comprising (a) introducing one or more modified nucleotides in the siNA molecule, and (b) assaying the siNA molecule of step (a) under conditions suitable for isolating an siNA molecule having reduced immunostimulatory properties compared to a corresponding siNA molecule having unmodified nucleotides. Each strand of the siNA molecule is about 18 to about 38 nucleotides in length. One strand of the siNA molecule comprises nucleotide sequence having sufficient complementarity to the target RNA for the siNA molecule to direct cleavage of the target RNA via RNA interference. In one embodiment, the reduced immunostimulatory properties comprise an abrogated or reduced induction of inflammatory or proinflammatory cytokines, such as interleukin-6 (IL-6) or tumor necrosis alpha (TNF-α), in response to the siNA being introduced in a cell, tissue, or organism. In another embodiment, the reduced immunostimulatory properties comprise an abrogated or reduced induction of Toll Like Receptors (TLRs), such as TLR3, TLR7, TLR8 or TLR9, in response to the siNA being introduced in a cell, tissue, or organism. In another embodiment, the reduced immunostimulatory properties comprise an abrogated or reduced induction of interferons, such as interferon alpha, in response to the siNA being introduced in a cell, tissue, or organism.

[0292] In one embodiment, the invention features siNA constructs that mediate RNAi against a target polynucleotide, wherein the siNA construct comprises one or more chemical modifications described herein that modulates the binding affinity between the sense and antisense strands of the siNA construct.

[0293] In another embodiment, the invention features a method for generating siNA molecules with increased binding affinity between the sense and antisense strands of the siNA molecule comprising (a) introducing nucleotides having any of Formula I-VII or any combination thereof into a siNA molecule, and (b) assaying the siNA molecule of step (a) under conditions suitable for isolating siNA molecules having increased binding affinity between the sense and antisense strands of the siNA molecule.

[0294] In one embodiment, the invention features siNA constructs that mediate RNAi against a target polynucleotide, wherein the siNA construct comprises one or more chemical modifications described herein that modulates the binding affinity between the antisense strand of the siNA construct and a complementary target RNA sequence within a cell.

[0295] In one embodiment, the invention features siNA constructs that mediate RNAi against a target polynucleotide, wherein the siNA construct comprises one or more chemical modifications described herein that modulates the binding affinity between the antisense strand of the siNA construct and a complementary target DNA sequence within a cell.

[0296] In another embodiment, the invention features a method for generating siNA molecules with increased binding affinity between the antisense strand of the siNA molecule and a complementary target RNA sequence comprising (a) introducing nucleotides having any of Formula I-VII or any combination thereof into a siNA molecule, and (b) assaying the siNA molecule of step (a) under conditions suitable for isolating siNA molecules having increased binding affinity between the antisense strand of the siNA molecule and a complementary target RNA sequence.

[0297] In another embodiment, the invention features a method for generating siNA molecules with increased binding affinity between the antisense strand of the siNA molecule and a complementary target DNA sequence comprising (a) introducing nucleotides having any of Formula I-VII or any combination thereof into a siNA molecule, and (b) assaying the siNA molecule of step (a) under conditions suitable for isolating siNA molecules having increased binding affinity between the antisense strand of the siNA molecule and a complementary target DNA sequence.

[0298] In one embodiment, the invention features siNA constructs that mediate RNAi against a target polynucleotide, wherein the siNA construct comprises one or more chemical modifications described herein that modulate the polymerase activity of a cellular polymerase capable of generating additional endogenous siNA molecules having sequence homology to the chemically-modified siNA construct.

[0299] In another embodiment, the invention features a method for generating siNA molecules capable of mediating increased polymerase activity of a cellular polymerase capable of generating additional endogenous siNA molecules having sequence homology to a chemically-modified siNA molecule comprising (a) introducing nucleotides having any of Formula I-VII or any combination thereof into a siNA molecule, and (b) assaying the siNA molecule of step (a) under conditions suitable for isolating siNA molecules capable of mediating increased polymerase activity of a cellular polymerase capable of generating additional endogenous siNA molecules having sequence homology to the chemically-modified siNA molecule.

[0300] In one embodiment, the invention features chemically-modified siNA constructs that mediate RNAi against a target polynucleotide in a cell, wherein the chemical modifications do not significantly effect the interaction of siNA with a target RNA molecule, DNA molecule and/or proteins or other factors that are essential for RNAi in a manner that would decrease the efficacy of RNAi mediated by such siNA constructs.

[0301] In another embodiment, the invention features a method for generating siNA molecules with improved RNAi specificity against polynucleotide targets comprising (a) introducing nucleotides having any of Formula I-VII or any combination thereof into a siNA molecule, and (b) assaying the siNA molecule of step (a) under conditions suitable for isolating siNA molecules having improved RNAi specificity. In one embodiment, improved specificity comprises having reduced off target effects compared to an unmodified siNA molecule. For example, introduction of terminal cap moieties at the 3′-end, 5′-end, or both 3′ and 5′-ends of the sense strand or region of a siNA molecule of the invention can direct the siNA to have improved specificity by preventing the sense strand or sense region from acting as a template for RNAi activity against a corresponding target having complementarity to the sense strand or sense region.

[0302] In another embodiment, the invention features a method for generating siNA molecules with improved RNAi activity against a target polynucleotide comprising (a) introducing nucleotides having any of Formula I-VII or any combination thereof into a siNA molecule, and (b) assaying the siNA molecule of step (a) under conditions suitable for isolating siNA molecules having improved RNAi activity.

[0303] In yet another embodiment, the invention features a method for generating siNA molecules with improved RNAi activity against a target RNA comprising (a) introducing nucleotides having any of Formula I-VII or any combination thereof into a siNA molecule, and (b) assaying the siNA molecule of step (a) under conditions suitable for isolating siNA molecules having improved RNAi activity against the target RNA.

[0304] In yet another embodiment, the invention features a method for generating siNA molecules with improved RNAi activity against a target DNA comprising (a) introducing nucleotides having any of Formula I-VII or any combination thereof into a siNA molecule, and (b) assaying the siNA molecule of step (a) under conditions suitable for isolating siNA molecules having improved RNAi activity against the target DNA.

[0305] In one embodiment, the invention features siNA constructs that mediate RNAi against a target polynucleotide, wherein the siNA construct comprises one or more chemical modifications described herein that modulates the cellular uptake of the siNA construct, such as cholesterol conjugation of the siNA.

[0306] In another embodiment, the invention features a method for generating siNA molecules against a target polynucleotide with improved cellular uptake comprising (a) introducing nucleotides having any of Formula I-VII or any combination thereof into a siNA molecule, and (b) assaying the siNA molecule of step (a) under conditions suitable for isolating siNA molecules having improved cellular uptake.

[0307] In one embodiment, the invention features siNA constructs that mediate RNAi against a target polynucleotide, wherein the siNA construct comprises one or more chemical modifications described herein that increases the bioavailability of the siNA construct, for example, by attaching polymeric conjugates such as polyethyleneglycol or equivalent conjugates that improve the pharmacokinetics of the siNA construct, or by attaching conjugates that target specific tissue types or cell types in vivo. Non-limiting examples of such conjugates are described in Vargeese et al., U.S. Ser. No. 10/201,394 incorporated by reference herein.

[0308] In one embodiment, the invention features a method for generating siNA molecules of the invention with improved bioavailability comprising (a) introducing a conjugate into the structure of a siNA molecule, and (b) assaying the siNA molecule of step (a) under conditions suitable for isolating siNA molecules having improved bioavailability. Such conjugates can include ligands for cellular receptors, such as peptides derived from naturally occurring protein ligands; protein localization sequences, including cellular ZIP code sequences; antibodies; nucleic acid aptamers; vitamins and other co-factors, such as folate and N-acetylgalactosamine; polymers, such as polyethyleneglycol (PEG); phospholipids; cholesterol; cholesterol derivatives, polyamines, such as spermine or spermidine; and others.

[0309] In one embodiment, the invention features a double stranded short interfering nucleic acid (siNA) molecule that comprises a first nucleotide sequence complementary to a target RNA sequence or a portion thereof, and a second sequence having complementarity to said first sequence, wherein said second sequence is chemically modified in a manner that it can no longer act as a guide sequence for efficiently mediating RNA interference and/or be recognized by cellular proteins that facilitate RNAi. In one embodiment, the first nucleotide sequence of the siNA is chemically modified as described herein. In one embodiment, the first nucleotide sequence of the siNA is not modified (e.g., is all RNA).

[0310] In one embodiment, the invention features a double stranded short interfering nucleic acid (siNA) molecule that comprises a first nucleotide sequence complementary to a target RNA sequence or a portion thereof, and a second sequence having complementarity to said first sequence, wherein the second sequence is designed or modified in a manner that prevents its entry into the RNAi pathway as a guide sequence or as a sequence that is complementary to a target nucleic acid (e.g., RNA) sequence. In one embodiment, the first nucleotide sequence of the siNA is chemically modified as described herein. In one embodiment, the first nucleotide sequence of the siNA is not modified (e.g., is all RNA). Such design or modifications are expected to enhance the activity of siNA and/or improve the specificity of siNA molecules of the invention. These modifications are also expected to minimize any off-target effects and/or associated toxicity.

[0311] In one embodiment, the invention features a double stranded short interfering nucleic acid (siNA) molecule that comprises a first nucleotide sequence complementary to a target RNA sequence or a portion thereof, and a second sequence having complementarity to said first sequence, wherein said second sequence is incapable of acting as a guide sequence for mediating RNA interference. In one embodiment, the first nucleotide sequence of the siNA is chemically modified as described herein. In one embodiment, the first nucleotide sequence of the siNA is not modified (e.g., is all RNA).

[0312] In one embodiment, the invention features a double stranded short interfering nucleic acid (siNA) molecule that comprises a first nucleotide sequence complementary to a target RNA sequence or a portion thereof, and a second sequence having complementarity to said first sequence, wherein said second sequence does not have a terminal 5′-hydroxyl (5′-OH) or 5′-phosphate group.

[0313] In one embodiment, the invention features a double stranded short interfering nucleic acid (siNA) molecule that comprises a first nucleotide sequence complementary to a target RNA sequence or a portion thereof, and a second sequence having complementarity to said first sequence, wherein said second sequence comprises a terminal cap moiety at the 5′-end of said second sequence. In one embodiment, the terminal cap moiety comprises an inverted abasic, inverted deoxy abasic, inverted nucleotide moiety, a group shown in FIG. 10, an alkyl or cycloalkyl group, a heterocycle, or any other group that prevents RNAi activity in which the second sequence serves as a guide sequence or template for RNAi.

[0314] In one embodiment, the invention features a double stranded short interfering nucleic acid (siNA) molecule that comprises a first nucleotide sequence complementary to a target RNA sequence or a portion thereof, and a second sequence having complementarity to said first sequence, wherein said second sequence comprises a terminal cap moiety at the 5′-end and 3′-end of said second sequence. In one embodiment, each terminal cap moiety individually comprises an inverted abasic, inverted deoxy abasic, inverted nucleotide moiety, a group shown in FIG. 10, an alkyl or cycloalkyl group, a heterocycle, or any other group that prevents RNAi activity in which the second sequence serves as a guide sequence or template for RNAi.

[0315] In one embodiment, the invention features a method for generating siNA molecules of the invention with improved specificity for down regulating or inhibiting the expression of a target nucleic acid (e.g., a DNA or RNA such as a gene or its corresponding RNA), comprising (a) introducing one or more chemical modifications into the structure of a siNA molecule, and (b) assaying the siNA molecule of step (a) under conditions suitable for isolating siNA molecules having improved specificity. In another embodiment, the chemical modification used to improve specificity comprises terminal cap modifications at the 5′-end, 3′-end, or both 5′ and 3′-ends of the siNA molecule. The terminal cap modifications can comprise, for example, structures shown in FIG. 10 (e.g. inverted deoxyabasic moieties) or any other chemical modification that renders a portion of the siNA molecule (e.g. the sense strand) incapable of mediating RNA interference against an off target nucleic acid sequence. In a non-limiting example, a siNA molecule is designed such that only the antisense sequence of the siNA molecule can serve as a guide sequence for RISC mediated degradation of a corresponding target RNA sequence. This can be accomplished by rendering the sense sequence of the siNA inactive by introducing chemical modifications to the sense strand that preclude recognition of the sense strand as a guide sequence by RNAi machinery. In one embodiment, such chemical modifications comprise any chemical group at the 5′-end of the sense strand of the siNA, or any other group that serves to render the sense strand inactive as a guide sequence for mediating RNA interference. These modifications, for example, can result in a molecule where the 5′-end of the sense strand no longer has a free 5′-hydroxyl (5′-OH) or a free 5′-phosphate group (e.g., phosphate, diphosphate, triphosphate, cyclic phosphate etc.). Non-limiting examples of such siNA constructs are described herein, such as “Stab 9/10”, “Stab 7/8”, “Stab 7/19”, “Stab 17/22”, “Stab 23/24”, “Stab 24/25”, and “Stab 24/26” (e.g., any siNA having Stab 7, 9, 17, 23, or 24 sense strands) chemistries and variants thereof (see Table IV) wherein the 5′-end and 3′-end of the sense strand of the siNA do not comprise a hydroxyl group or phosphate group. Herein, numeric Stab chemistries include both 2′-fluoro and 2′-OCF3 versions of the chemistries shown in Table IV. For example, “Stab 7/8” refers to both Stab 7/8 and Stab 7F/8F etc.

[0316] In one embodiment, the invention features a method for generating siNA molecules of the invention with improved specificity for down regulating or inhibiting the expression of a target nucleic acid (e.g., a DNA or RNA such as a gene or its corresponding RNA), comprising introducing one or more chemical modifications into the structure of a siNA molecule that prevent a strand or portion of the siNA molecule from acting as a template or guide sequence for RNAi activity. In one embodiment, the inactive strand or sense region of the siNA molecule is the sense strand or sense region of the siNA molecule, i.e. the strand or region of the siNA that does not have complementarity to the target nucleic acid sequence. In one embodiment, such chemical modifications comprise any chemical group at the 5′-end of the sense strand or region of the siNA that does not comprise a 5′-hydroxyl (5′-OH) or 5′-phosphate group, or any other group that serves to render the sense strand or sense region inactive as a guide sequence for mediating RNA interference. Non-limiting examples of such siNA constructs are described herein, such as “Stab 9/10”, “Stab 7/8”, “Stab 7/19”, “Stab 17/22”, “Stab 23/24”, “Stab 24/25”, and “Stab 24/26” (e.g., any siNA having Stab 7, 9, 17, 23, or 24 sense strands) chemistries and variants thereof (see Table IV) wherein the 5′-end and 3′-end of the sense strand of the siNA do not comprise a hydroxyl group or phosphate group. Herein, numeric Stab chemistries include both 2′-fluoro and 2′-OCF3 versions of the chemistries shown in Table IV. For example, “Stab 7/8” refers to both Stab 7/8 and Stab 7F/8F etc.

[0317] In one embodiment, the invention features a method for screening siNA molecules that are active in mediating RNA interference against a target nucleic acid sequence comprising (a) generating a plurality of unmodified siNA molecules, (b) screening the siNA molecules of step (a) under conditions suitable for isolating siNA molecules that are active in mediating RNA interference against the target nucleic acid sequence, and (c) introducing chemical modifications (e.g. chemical modifications as described herein or as otherwise known in the art) into the active siNA molecules of (b). In one embodiment, the method further comprises re-screening the chemically modified siNA molecules of step (c) under conditions suitable for isolating chemically modified siNA molecules that are active in mediating RNA interference against the target nucleic acid sequence.

[0318] In one embodiment, the invention features a method for screening chemically modified siNA molecules that are active in mediating RNA interference against a target nucleic acid sequence comprising (a) generating a plurality of chemically modified siNA molecules (e.g. siNA molecules as described herein or as otherwise known in the art), and (b) screening the siNA molecules of step (a) under conditions suitable for isolating chemically modified siNA molecules that are active in mediating RNA interference against the target nucleic acid sequence.

[0319] The term “ligand” refers to any compound or molecule, such as a drug, peptide, hormone, or neurotransmitter, that is capable of interacting with another compound, such as a receptor, either directly or indirectly. The receptor that interacts with a ligand can be present on the surface of a cell or can alternately be an intercellular receptor. Interaction of the ligand with the receptor can result in a biochemical reaction, or can simply be a physical interaction or association.

[0320] In another embodiment, the invention features a method for generating siNA molecules of the invention with improved bioavailability comprising (a) introducing an excipient formulation to a siNA molecule, and (b) assaying the siNA molecule of step (a) under conditions suitable for isolating siNA molecules having improved bioavailability. Such excipients include polymers such as cyclodextrins, lipids, cationic lipids, polyamines, phospholipids, nanoparticles, receptors, ligands, and others.

[0321] In another embodiment, the invention features a method for generating siNA molecules of the invention with improved bioavailability comprising (a) introducing nucleotides having any of Formulae I-VII or any combination thereof into a siNA molecule, and (b) assaying the siNA molecule of step (a) under conditions suitable for isolating siNA molecules having improved bioavailability.

[0322] In another embodiment, polyethylene glycol (PEG) can be covalently attached to siNA compounds of the present invention. The attached PEG can be any molecular weight, preferably from about 100 to about 50,000 daltons (Da).

[0323] The present invention can be used alone or as a component of a kit having at least one of the reagents necessary to carry out the in vitro or in vivo introduction of RNA to test samples and/or subjects. For example, preferred components of the kit include a siNA molecule of the invention and a vehicle that promotes introduction of the siNA into cells of interest as described herein (e.g., using lipids and other methods of transfection known in the art, see for example Beigelman et al, U.S. Pat. No. 6,395,713). The kit can be used for target validation, such as in determining gene function and/or activity, or in drug optimization, and in drug discovery (see for example Usman et al., U.S. Ser. No. 60/402,996). Such a kit can also include instructions to allow a user of the kit to practice the invention.

[0324] The term “short interfering nucleic acid”, “siNA”, “short interfering RNA”, “siRNA”, “short interfering nucleic acid molecule”, “short interfering oligonucleotide molecule”, or “chemically-modified short interfering nucleic acid molecule” as used herein refers to any nucleic acid molecule capable of inhibiting or down regulating gene expression or viral replication by mediating RNA interference “RNAi” or gene silencing in a sequence-specific manner. For example the siNA can be a double-stranded nucleic acid molecule comprising self-complementary sense and antisense regions, wherein the antisense region comprises nucleotide sequence that is complementary to nucleotide sequence in a target nucleic acid molecule or a portion thereof and the sense region having nucleotide sequence corresponding to the target nucleic acid sequence or a portion thereof. The siNA can be assembled from two separate oligonucleotides, where one strand is the sense strand and the other is the antisense strand, wherein the antisense and sense strands are self-complementary (i.e., each strand comprises nucleotide sequence that is complementary to nucleotide sequence in the other strand; such as where the antisense strand and sense strand form a duplex or double stranded structure, for example wherein the double stranded region is about 15 to about 30, e.g., about 15, 16, 17, 18, 19, 20, 21, 22, 23, 24, 25, 26, 27, 28, 29 or 30 base pairs; the antisense strand comprises nucleotide sequence that is complementary to nucleotide sequence in a target nucleic acid molecule or a portion thereof and the sense strand comprises nucleotide sequence corresponding to the target nucleic acid sequence or a portion thereof (e.g., about 15 to about 25 or more nucleotides of the siNA molecule are complementary to the target nucleic acid or a portion thereof). Alternatively, the siNA is assembled from a single oligonucleotide, where the self-complementary sense and antisense regions of the siNA are linked by means of a nucleic acid based or non-nucleic acid-based linker(s). The siNA can be a polynucleotide with a duplex, asymmetric duplex, hairpin or asymmetric hairpin secondary structure, having self-complementary sense and antisense regions, wherein the antisense region comprises nucleotide sequence that is complementary to nucleotide sequence in a separate target nucleic acid molecule or a portion thereof and the sense region having nucleotide sequence corresponding to the target nucleic acid sequence or a portion thereof. The siNA can be a circular single-stranded polynucleotide having two or more loop structures and a stem comprising self-complementary sense and antisense regions, wherein the antisense region comprises nucleotide sequence that is complementary to nucleotide sequence in a target nucleic acid molecule or a portion thereof and the sense region having nucleotide sequence corresponding to the target nucleic acid sequence or a portion thereof, and wherein the circular polynucleotide can be processed either in vivo or in vitro to generate an active siNA molecule capable of mediating RNAi. The siNA can also comprise a single stranded polynucleotide having nucleotide sequence complementary to nucleotide sequence in a target nucleic acid molecule or a portion thereof (for example, where such siNA molecule does not require the presence within the siNA molecule of nucleotide sequence corresponding to the target nucleic acid sequence or a portion thereof), wherein the single stranded polynucleotide can further comprise a terminal phosphate group, such as a 5′-phosphate (see for example Martinez et al., 2002, Cell., 110, 563-574 and Schwarz et al., 2002, Molecular Cell, 10, 537-568), or 5′,3′-diphosphate. In certain embodiments, the siNA molecule of the invention comprises separate sense and antisense sequences or regions, wherein the sense and antisense regions are covalently linked by nucleotide or non-nucleotide linkers molecules as is known in the art, or are alternately non-covalently linked by ionic interactions, hydrogen bonding, van der waals interactions, hydrophobic interactions, and/or stacking interactions. In certain embodiments, the siNA molecules of the invention comprise nucleotide sequence that is complementary to nucleotide sequence of a target gene. In another embodiment, the siNA molecule of the invention interacts with nucleotide sequence of a target gene in a manner that causes inhibition of expression of the target gene. As used herein, siNA molecules need not be limited to those molecules containing only RNA, but further encompasses chemically-modified nucleotides and non-nucleotides. In certain embodiments, the short interfering nucleic acid molecules of the invention lack 2′-hydroxy (2′-OH) containing nucleotides. Applicant describes in certain embodiments short interfering nucleic acids that do not require the presence of nucleotides having a 2′-hydroxy group for mediating RNAi and as such, short interfering nucleic acid molecules of the invention optionally do not include any ribonucleotides (e.g., nucleotides having a 2′-OH group). Such siNA molecules that do not require the presence of ribonucleotides within the siNA molecule to support RNAi can however have an attached linker or linkers or other attached or associated groups, moieties, or chains containing one or more nucleotides with 2′-OH groups. Optionally, siNA molecules can comprise ribonucleotides at about 5, 10, 20, 30, 40, or 50% of the nucleotide positions. The modified short interfering nucleic acid molecules of the invention can also be referred to as short interfering modified oligonucleotides “siMON.” As used herein, the term siNA is meant to be equivalent to other terms used to describe nucleic acid molecules that are capable of mediating sequence specific RNAi, for example short interfering RNA (siRNA), double-stranded RNA (dsRNA), micro-RNA (miRNA), short hairpin RNA (shRNA), short interfering oligonucleotide, short interfering nucleic acid, short interfering modified oligonucleotide, chemically-modified siRNA, post-transcriptional gene silencing RNA (ptgsRNA), and others. Non limiting examples of siNA molecules of the invention are shown in FIGS. 4-6, and Tables II and III herein. Such siNA molecules are distinct from other nucleic acid technologies known in the art that mediate inhibition of gene expression, such as ribozymes, antisense, triplex forming, aptamer, 2,5-A chimera, or decoy oligonucleotides.

[0325] By “RNA interference” or “RNAi” is meant a biological process of inhibiting or down regulating gene expression in a cell as is generally known in the art and which is mediated by short interfering nucleic acid molecules, see for example Zamore and Haley, 2005, Science, 309, 1519-1524; Vaughn and Martienssen, 2005, Science, 309, 1525-1526; Zamore et al., 2000, Cell, 101, 25-33; Bass, 2001, Nature, 411, 428-429; Elbashir et al., 2001, Nature, 411, 494-498; and Kreutzer et al., International PCT Publication No. WO 00/44895; Zernicka-Goetz et al., International PCT Publication No. WO 01/36646; Fire, International PCT Publication No. WO 99/32619; Plaetinck et al., International PCT Publication No. WO 00/01846; Mello and Fire, International PCT Publication No. WO 01/29058; Deschamps-Depaillette, International PCT Publication No. WO 99/07409; and Li et al., International PCT Publication No. WO 00/44914; Allshire, 2002, Science, 297, 1818-1819; Volpe et al., 2002, Science, 297, 1833-1837; Jenuwein, 2002, Science, 297, 2215-2218; and Hall et al., 2002, Science, 297, 2232-2237; Hutvagner and Zamore, 2002, Science, 297, 2056-60; McManus et al., 2002, RNA, 8, 842-850; Reinhart et al., 2002, Gene & Dev., 16, 1616-1626; and Reinhart & Bartel, 2002, Science, 297, 1831). In addition, as used herein, the term RNAi is meant to be equivalent to other terms used to describe sequence specific RNA interference, such as post transcriptional gene silencing, translational inhibition, transcriptional inhibition, or epigenetics. For example, siNA molecules of the invention can be used to epigenetically silence genes at both the post-transcriptional level or the pre-transcriptional level. In a non-limiting example, epigenetic modulation of gene expression by siNA molecules of the invention can result from siNA mediated modification of chromatin structure or methylation patterns to alter gene expression (see, for example, Verdel et al., 2004, Science, 303, 672-676; Pal-Bhadra et al., 2004, Science, 303, 669-672; Allshire, 2002, Science, 297, 1818-1819; Volpe et al., 2002, Science, 297, 1833-1837; Jenuwein, 2002, Science, 297, 2215-2218; and Hall et al., 2002, Science, 297, 2232-2237). In another non-limiting example, modulation of gene expression by siNA molecules of the invention can result from siNA mediated cleavage of RNA (either coding or non-coding RNA) via RISC, or alternately, translational inhibition as is known in the art. In another embodiment, modulation of gene expression by siNA molecules of the invention can result from transcriptional inhibition (see for example Janowski et al., 2005, Nature Chemical Biology, 1, 216-222).

[0326] In one embodiment, a siNA molecule of the invention is a duplex forming oligonucleotide “DFO”, (see for example FIGS. 14-15 and Vaish et al., U.S. Ser. No. 10/727,780 filed Dec. 3, 2003 and International PCT Application No. US04/16390, filed May 24, 2004).

[0327] In one embodiment, a siNA molecule of the invention is a multifunctional siNA, (see for example FIGS. 16-28 and Jadhav et al., U.S. Ser. No. 60/543,480 filed Feb. 10, 2004 and International PCT Application No. US04/16390, filed May 24, 2004). In one embodiment, the multifunctional siNA of the invention can comprise sequence targeting, for example, two or more regions of HCV RNA (see for example target sequences in Tables II and III). In one embodiment, the multifunctional siNA of the invention can comprise sequence targeting HCV RNA and one or more cellular targets involved in the HCV lifecyle, such as cellular receptors, cell surface molecules, cellular enzymes, cellular transcription factors, and/or cytokines, second messengers, and cellular accessory molecules including, but not limited to, La antigen (see for example Costa-Mattioli et al., 2004, Mol Cell Biol., 24, 6861-70, e.g., Genbank Accession No. NM_{—}003142) (e.g., interferon regulatory factors (IRFs; e.g., Genbank Accession No. AF082503.1); cellular PKR protein kinase (e.g., Genbank Accession No. XM_{—}002661.7); human eukaryotic initiation factors 2B (elF2Bgamma; e.g., Genbank Accession No. AF256223, and/or elF2gamma; e.g., Genbank Accession No. NM_{—}006874.1); human DEAD Box protein (DDX3; e.g., Genbank Accession No. XM_{—}018021.2); and cellular proteins that bind to the poly(U) tract of the HCV 3′-UTR, such as polypyrimidine tract-binding protein (e.g., Genbank Accession Nos. NM_{—}031991.1 and XM_{—}042972.3).

[0328] By “asymmetric hairpin” as used herein is meant a linear siNA molecule comprising an antisense region, a loop portion that can comprise nucleotides or non-nucleotides, and a sense region that comprises fewer nucleotides than the antisense region to the extent that the sense region has enough complementary nucleotides to base pair with the antisense region and form a duplex with loop. For example, an asymmetric hairpin siNA molecule of the invention can comprise an antisense region having length sufficient to mediate RNAi in a cell or in vitro system (e.g. about 15 to about 30, or about 15, 16, 17, 18, 19, 20, 21, 22, 23, 24, 25, 26, 27, 28, 29, or 30 nucleotides) and a loop region comprising about 4 to about 12 (e.g., about 4, 5, 6, 7, 8, 9, 10, 11, or 12) nucleotides, and a sense region having about 3 to about 25 (e.g., about 3, 4, 5, 6, 7, 8, 9, 10, 11, 12, 13, 14, 15, 16, 17, 18, 19, 20, 21, 22, 23, 24, or 25) nucleotides that are complementary to the antisense region. The asymmetric hairpin siNA molecule can also comprise a 5′-terminal phosphate group that can be chemically modified. The loop portion of the asymmetric hairpin siNA molecule can comprise nucleotides, non-nucleotides, linker molecules, or conjugate molecules as described herein.

[0329] By “asymmetric duplex” as used herein is meant a siNA molecule having two separate strands comprising a sense region and an antisense region, wherein the sense region comprises fewer nucleotides than the antisense region to the extent that the sense region has enough complementary nucleotides to base pair with the antisense region and form a duplex. For example, an asymmetric duplex siNA molecule of the invention can comprise an antisense region having length sufficient to mediate RNAi in a cell or in vitro system (e.g., about 15 to about 30, or about 15, 16, 17, 18, 19, 20, 21, 22, 23, 24, 25, 26, 27, 28, 29, or 30 nucleotides) and a sense region having about 3 to about 25 (e.g., about 3, 4, 5, 6, 7, 8, 9, 10, 11, 12, 13, 14, 15, 16, 17, 18, 19, 20, 21, 22, 23, 24, or 25) nucleotides that are complementary to the antisense region.

[0330] By “modulate” is meant that the expression of the gene, or level of a RNA molecule or equivalent RNA molecules encoding one or more proteins or protein subunits, or activity of one or more proteins or protein subunits is up regulated or down regulated, such that expression, level, or activity is greater than or less than that observed in the absence of the modulator. For example, the term “modulate” can mean “inhibit,” but the use of the word “modulate” is not limited to this definition.

[0331] By “inhibit”, “down-regulate”, or “reduce”, it is meant that the expression of the gene, or level of RNA molecules or equivalent RNA molecules encoding one or more proteins or protein subunits, or activity of one or more proteins or protein subunits, is reduced below that observed in the absence of the nucleic acid molecules (e.g., siNA) of the invention. In one embodiment, inhibition, down-regulation or reduction with an siNA molecule is below that level observed in the presence of an inactive or attenuated molecule. In another embodiment, inhibition, down-regulation, or reduction with siNA molecules is below that level observed in the presence of, for example, an siNA molecule with scrambled sequence or with mismatches. In another embodiment, inhibition, down-regulation, or reduction of gene expression with a nucleic acid molecule of the instant invention is greater in the presence of the nucleic acid molecule than in its absence. In one embodiment, inhibition, down regulation, or reduction of gene expression is associated with post transcriptional silencing, such as RNAi mediated cleavage of a target nucleic acid molecule (e.g. RNA) or inhibition of translation. In one embodiment, inhibition, down regulation, or reduction of gene expression is associated with pretranscriptional silencing, such as by alterations in DNA methylation patterns and DNA chromatin structure.

[0332] By “up-regulate”, or “promote”, it is meant that the expression of the gene, or level of RNA molecules or equivalent RNA molecules encoding one or more proteins or protein subunits, or activity of one or more proteins or protein subunits, is increased above that observed in the absence of the nucleic acid molecules (e.g., siNA) of the invention. In one embodiment, up-regulation or promotion of gene expression with an siNA molecule is above that level observed in the presence of an inactive or attenuated molecule. In another embodiment, up-regulation or promotion of gene expression with siNA molecules is above that level observed in the presence of, for example, an siNA molecule with scrambled sequence or with mismatches. In another embodiment, up-regulation or promotion of gene expression with a nucleic acid molecule of the instant invention is greater in the presence of the nucleic acid molecule than in its absence. In one embodiment, up-regulation or promotion of gene expression is associated with inhibition of RNA mediated gene silencing, such as RNAi mediated cleavage or silencing of a coding or non-coding RNA target that down regulates, inhibits, or silences the expression of the gene of interest to be up-regulated. The down regulation of gene expression can, for example, be induced by a coding RNA or its encoded protein, such as through negative feedback or antagonistic effects. The down regulation of gene expression can, for example, be induced by a non-coding RNA having regulatory control over a gene of interest, for example by silencing expression of the gene via translational inhibition, chromatin structure, methylation, RISC mediated RNA cleavage, or translational inhibition. As such, inhibition or down regulation of targets that down regulate, suppress, or silence a gene of interest can be used to up-regulate or promote expression of the gene of interest toward therapeutic use.

[0333] By “gene”, or “target gene” or “target DNA”, is meant a nucleic acid that encodes an RNA, for example, nucleic acid sequences including, but not limited to, structural genes encoding a polypeptide. A gene or target gene can also encode a functional RNA (fRNA) or non-coding RNA (ncRNA), such as small temporal RNA (stRNA), micro RNA (miRNA), small nuclear RNA (snRNA), short interfering RNA (siRNA), small nucleolar RNA (snRNA), ribosomal RNA (rRNA), transfer RNA (tRNA) and precursor RNAs thereof. Such non-coding RNAs can serve as target nucleic acid molecules for siNA mediated RNA interference in modulating the activity of fRNA or ncRNA involved in functional or regulatory cellular processes. Abberant fRNA or ncRNA activity leading to disease can therefore be modulated by siNA molecules of the invention. siNA molecules targeting fRNA and ncRNA can also be used to manipulate or alter the genotype or phenotype of a subject, organism or cell, by intervening in cellular processes such as genetic imprinting, transcription, translation, or nucleic acid processing (e.g., transamination, methylation etc.). The target gene can be a gene derived from a cell, an endogenous gene, a transgene, or exogenous genes such as genes of a pathogen, for example a virus, which is present in the cell after infection thereof. The cell containing the target gene can be derived from or contained in any organism, for example a plant, animal, protozoan, virus, bacterium, or fungus. Non-limiting examples of plants include monocots, dicots, or gymnosperms. Non-limiting examples of animals include vertebrates or invertebrates. Non-limiting examples of fungi include molds or yeasts. For a review, see for example Snyder and Gerstein, 2003, Science, 300, 258-260.

[0334] By “non-canonical base pair” is meant any non-Watson Crick base pair, such as mismatches and/or wobble base pairs, including flipped mismatches, single hydrogen bond mismatches, trans-type mismatches, triple base interactions, and quadruple base interactions. Non-limiting examples of such non-canonical base pairs include, but are not limited to, AC reverse Hoogsteen, AC wobble, AU reverse Hoogsteen, GU wobble, AA N7 amino, CC 2-carbonyl-amino(H1)-N3-amino(H2), GA sheared, UC 4-carbonyl-amino, UU imino-carbonyl, AC reverse wobble, AU Hoogsteen, AU reverse Watson Crick, CG reverse Watson Crick, GC N3-amino-amino N3, AA Ni-amino symmetric, AA N7-amino symmetric, GA N7-N1 amino-carbonyl, GA+ carbonyl-amino N7-N1, GG N1-carbonyl symmetric, GG N3-amino symmetric, CC carbonyl-amino symmetric, CC N3-amino symmetric, UU 2-carbonyl-imino symmetric, UU 4-carbonyl-imino symmetric, AA amino-N3, AA N1-amino, AC amino 2-carbonyl, AC N3-amino, AC N7-amino, AU amino-4-carbonyl, AU N1-imino, AU N3-imino, AU N7-imino, CC carbonyl-amino, GA amino-N1, GA amino-N7, GA carbonyl-amino, GA N3-amino, GC amino-N3, GC carbonyl-amino, GC N3-amino, GC N7-amino, GG amino-N7, GG carbonyl-imino, GG N7-amino, GU amino-2-carbonyl, GU carbonyl-imino, GU imino-2-carbonyl, GU N7-imino, psiU imino-2-carbonyl, UC 4-carbonyl-amino, UC imino-carbonyl, UU imino-4-carbonyl, AC C2-H-N3, GA carbonyl-C2-H, UU imino-4-carbonyl 2 carbonyl-C5-H, AC amino(A) N3(C)-carbonyl, GC imino amino-carbonyl, Gpsi imino-2-carbonyl amino-2- carbonyl, and GU imino amino-2-carbonyl base pairs.

[0335] By “HCV” as used herein is meant, any hepatitis C virus or HCV protein, peptide, or polypeptide having HCV activity, such as encoded by HCV Genbank Accession Nos. shown in Table I. The term HCV also refers to nucleic acid sequences encoding any HCV protein, peptide, or polypeptide having HCV activity. The term “HCV” is also meant to include other HCV encoding sequence, such as other HCV isoforms, mutant HCV genes, splice variants of HCV genes, and HCV gene polymorphisms. In one embodiment, the term HCV as used herein refers to cellular or host proteins or polynucleotides encoding such proteins or that are otherwise involved in HCV infection and/or replication.

[0336] By “target” as used herein is meant, any target protein, peptide, or polypeptide, such as encoded by Genbank Accession Nos. herein and in U.S. Ser. No. 10/923,536 and U.S. Ser. No. 10/923,536, both incorporated by reference herein. The term “target” also refers to nucleic acid sequences or target polynucleotide sequence encoding any target protein, peptide, or polypeptide, such as proteins, peptides, or polypeptides encoded by sequences having Genbank Accession Nos. shown herein or in U.S. Ser. No. 10/923,536 and U.S. Ser. No. 10/923536. The target of interest can include target polynucleotide sequences, such as target DNA or target RNA. The term “target” is also meant to include other sequences, such as differing isoforms, mutant target genes, splice variants of target polynucleotides, target polymorphisms, and non-coding (e.g., ncRNA, miRNA, sRNA) or other regulatory polynucleotide sequences as described herein. Therefore, in various embodiments of the invention, a double stranded nucleic acid molecule of the invention (e.g., siNA) having complementarity to a target RNA can be used to inhibit or down regulate miRNA or other ncRNA activity. In one embodiment, inhibition of miRNA or ncRNA activity can be used to down regulate or inhibit gene expression (e.g., gene targets described herein or otherwise known in the art) or viral replication (e.g., viral targets described herein or otherwise known in the art) that is dependent on miRNA or ncRNA activity. In another embodiment, inhibition of miRNA or ncRNA activity by double stranded nucleic acid molecules of the invention (e.g. siNA) having complementarity to the miRNA or ncRNA can be used to up regulate-or promote target gene expression (e.g., gene targets described herein or otherwise known in the art) where the expression of such genes is down regulated, suppressed, or silenced by the miRNA or ncRNA. Such up-regulation of gene expression can be used to treat diseases and conditions associated with a loss of function or haploinsufficiency as are generally known in the art.

[0337] By “homologous sequence” is meant, a nucleotide sequence that is shared by one or more polynucleotide sequences, such as genes, gene transcripts and/or non-coding polynucleotides. For example, a homologous sequence can be a nucleotide sequence that is shared by two or more genes encoding related but different proteins, such as different members of a gene family, different protein epitopes, different protein isoforms or completely divergent genes, such as a cytokine and its corresponding receptors. A homologous sequence can be a nucleotide sequence that is shared by two or more non-coding polynucleotides, such as noncoding DNA or RNA, regulatory sequences, introns, and sites of transcriptional control or regulation. Homologous sequences can also include conserved sequence regions shared by more than one polynucleotide sequence. Homology does not need to be perfect homology (e.g., 100%), as partially homologous sequences are also contemplated by the instant invention (e.g., 99%, 98%, 97%, 96%, 95%, 94%, 93%, 92%, 91%, 90%, 89%, 88%, 87%, 86%, 85%, 84%, 83%, 82%, 81%, 80% etc.).

[0338] By “conserved sequence region” is meant, a nucleotide sequence of one or more regions in a polynucleotide does not vary significantly between generations or from one biological system, subject, or organism to another biological system, subject, or organism. The polynucleotide can include both coding and non-coding DNA and RNA.

[0339] By “sense region” is meant a nucleotide sequence of a siNA molecule having complementarity to an antisense region of the siNA molecule. In addition, the sense region of a siNA molecule can comprise a nucleic acid sequence having homology with a target nucleic acid sequence. In one embodiment, the sense region of the siNA molecule is referred to as the sense strand or passenger strand.

[0340] By “antisense region” is meant a nucleotide sequence of a siNA molecule having complementarity to a target nucleic acid sequence. In addition, the antisense region of a siNA molecule can optionally comprise a nucleic acid sequence having complementarity to a sense region of the siNA molecule. In one embodiment, the antisense region of the siNA molecule is referred to as the antisense strand or guide strand.

[0341] By “target nucleic acid” or “target polynucleotide” is meant any nucleic acid sequence whose expression or activity is to be modulated. The target nucleic acid can be DNA or RNA. In one embodiment, a target nucleic acid of the invention is target RNA or DNA.

[0342] By “complementarity” is meant that a nucleic acid can form hydrogen bond(s) with another nucleic acid sequence by either traditional Watson-Crick or other non-traditional types as described herein. In one embodiment, a double stranded nucleic acid molecule of the invention, such as an siNA molecule, wherein each strand is between 15 and 30 nucleotides in length, comprises between about 10% and about 100% (e.g., about 10%, 20%, 30%, 40%, 50%, 60%, 70%, 80%, 90%, or 100%) complementarity between the two strands of the double stranded nucleic acid molecule. In another embodiment, a double stranded nucleic acid molecule of the invention, such as an siNA molecule, where one strand is the sense strand and the other stand is the antisense strand, wherein each strand is between 15 and 30 nucleotides in length, comprises between at least about 10% and about 100% (e.g., at least about 10%, 20%, 30%, 40%, 50%, 60%, 70%, 80%, 90%, or 100%) complementarity between the nucleotide sequence in the antisense strand of the double stranded nucleic acid molecule and the nucleotide sequence of its corresponding target nucleic acid molecule, such as a target RNA or target mRNA or viral RNA. In one embodiment, a double stranded nucleic acid molecule of the invention, such as an siNA molecule, where one strand comprises nucleotide sequence that is referred to as the sense region and the other strand comprises a nucleotide sequence that is referred to as the antisense region, wherein each strand is between 15 and 30 nucleotides in length, comprises between about 10% and about 100% (e.g., about 10%, 20%, 30%, 40%, 50%, 60%, 70%, 80%, 90%, or 100%) complementarity between the sense region and the antisense region of the double stranded nucleic acid molecule. In reference to the nucleic molecules of the present invention, the binding free energy for a nucleic acid molecule with its complementary sequence is sufficient to allow the relevant function of the nucleic acid to proceed, e.g., RNAi activity. Determination of binding free energies for nucleic acid molecules is well known in the art (see, e.g., Turner et al., 1987, CSH Symp. Quant. Biol. LII pp. 123-133; Frier et al., 1986, Proc. Nat. Acad. Sci. USA 83:9373-9377; Turner et al., 1987, J. Am. Chem. Soc. 109:3783-3785). A percent complementarity indicates the percentage of contiguous residues in a nucleic acid molecule that can form hydrogen bonds (e.g., Watson-Crick base pairing) with a second nucleic acid sequence (e.g., 5, 6, 7, 8, 9, or 10 nucleotides out of a total of 10 nucleotides in the first oligonucleotide being based paired to a second nucleic acid sequence having 10 nucleotides represents 50%, 60%, 70%, 80%, 90%, and 100% complementary respectively). In one embodiment, a siNA molecule of the invention has perfect complementarity between the sense strand or sense region and the antisense strand or antisense region of the siNA molecule. In one embodiment, a siNA molecule of the invention is perfectly complementary to a corresponding target nucleic acid molecule. “Perfectly complementary” means that all the contiguous residues of a nucleic acid sequence will hydrogen bond with the same number of contiguous residues in a second nucleic acid sequence. In one embodiment, a siNA molecule of the invention comprises about 15 to about 30 or more (e.g., about 15, 16, 17, 18, 19, 20, 21, 22, 23, 24, 25, 26, 27, 28, 29, or 30 or more) nucleotides that are complementary to one or more target nucleic acid molecules or a portion thereof. In one embodiment, a siNA molecule of the invention has partial complementarity (i.e., less than 100% complementarity) between the sense strand or sense region and the antisense strand or antisense region of the siNA molecule or between the antisense strand or antisense region of the siNA molecule and a corresponding target nucleic acid molecule. For example, partial complementarity can include various mismatches or non-based paired nucleotides (e.g., 1, 2, 3, 4, 5 or more mismatches or non-based paired nucleotides) within the siNA structure which can result in bulges, loops, or overhangs that result between the between the sense strand or sense region and the antisense strand or antisense region of the siNA molecule or between the antisense strand or antisense region of the siNA molecule and a corresponding target nucleic acid molecule.

[0343] In one embodiment, a double stranded nucleic acid molecule of the invention, such as siNA molecule, has perfect complementarity between the sense strand or sense region and the antisense strand or antisense region of the nucleic acid molecule. In one embodiment, double stranded nucleic acid molecule of the invention, such as siNA molecule, is perfectly complementary to a corresponding target nucleic acid molecule.

[0344] In one embodiment, double stranded nucleic acid molecule of the invention, such as siNA molecule, has partial complementarity (i.e., less than 100% complementarity) between the sense strand or sense region and the antisense strand or antisense region of the double stranded nucleic acid molecule or between the antisense strand or antisense region of the nucleic acid molecule and a corresponding target nucleic acid molecule. For example, partial complementarity can include various mismatches or non-base paired nucleotides (e.g., 1, 2, 3, 4, 5 or more mismatches or non-based paired nucleotides, such as nucleotide bulges) within the double stranded nucleic acid molecule, structure which can result in bulges, loops, or overhangs that result between the sense strand or sense region and the antisense strand or antisense region of the double stranded nucleic acid molecule or between the antisense strand or antisense region of the double stranded nucleic acid molecule and a corresponding target nucleic acid molecule.

[0345] In one embodiment, double stranded nucleic acid molecule of the invention is a microRNA (miRNA). By “mircoRNA” or “miRNA” is meant, a small double stranded RNA that regulates the expression of target messenger RNAs either by mRNA cleavage, translational repression/inhibition or heterochromatic silencing (see for example Ambros, 2004, Nature, 431, 350-355; Bartel, 2004, Cell, 116, 281-297; Cullen, 2004, Virus Research., 102, 3-9; He et al., 2004, Nat. Rev. Genet., 5, 522-531; and Ying et al., 2004, Gene, 342, 25-28). In one embodiment, the microRNA of the invention, has partial complementarity (i.e., less than 100% complementarity) between the sense strand or sense region and the antisense strand or antisense region of the miRNA molecule or between the antisense strand or antisense region of the miRNA and a corresponding target nucleic acid molecule. For example, partial complementarity can include various mismatches or non-base paired nucleotides (e.g., 1, 2, 3, 4, 5 or more mismatches or non-based paired nucleotides, such as nucleotide bulges) within the double stranded nucleic acid molecule, structure which can result in bulges, loops, or overhangs that result between the sense strand or sense region and the antisense strand or antisense region of the miRNA or between the antisense strand or antisense region of the miRNA and a corresponding target nucleic acid molecule.

[0346] In one embodiment, siNA molecules of the invention that down regulate or reduce target gene expression are used for treating, preventing or reducing HCV infection, liver failure, hepatocellular carcinoma, or cirrhosis in a subject or organism as described herein or otherwise known in the art.

[0347] In one embodiment of the present invention, each sequence of a siNA molecule of the invention is independently about 15 to about 30 nucleotides in length, in specific embodiments about 15, 16, 17, 18, 19, 20, 21, 22, 23, 24, 25, 26, 27, 28, 29, or 30 nucleotides in length. In another embodiment, the siNA duplexes of the invention independently comprise about 15 to about 30 base pairs (e.g., about 15, 16, 17, 18, 19, 20, 21, 22, 23, 24, 25, 26, 27, 28, 29, or 30). In another embodiment, one or more strands of the siNA molecule of the invention independently comprises about 15 to about 30 nucleotides (e.g., about 15, 16, 17, 18, 19, 20, 21, 22, 23, 24, 25, 26, 27, 28, 29, or 30) that are complementary to a target nucleic acid molecule. In yet another embodiment, siNA molecules of the invention comprising hairpin or circular structures are about 35 to about 55 (e.g., about 35, 40, 45, 50 or 55) nucleotides in length, or about 38 to about 44 (e.g., about 38, 39, 40, 41, 42, 43, or 44) nucleotides in length and comprising about 15 to about 25 (e.g., about 15, 16, 17, 18, 19, 20, 21, 22, 23, 24, or 25) base pairs. Exemplary siNA molecules of the invention are shown in Tables II and III and/or FIGS. 4-5.

[0348] As used herein “cell” is used in its usual biological sense, and does not refer to an entire multicellular organism, e.g., specifically does not refer to a human. The cell can be present in an organism, e.g., birds, plants and mammals such as humans, cows, sheep, apes, monkeys, swine, dogs, and cats. The cell can be prokaryotic (e.g., bacterial cell) or eukaryotic (e.g., mammalian or plant cell). The cell can be of somatic or germ line origin, totipotent or pluripotent, dividing or non-dividing. The cell can also be derived from or can comprise a gamete or embryo, a stem cell, or a fully differentiated cell.

[0349] The siNA molecules of the invention are added directly, or can be complexed with cationic lipids, packaged within liposomes, or otherwise delivered to target cells or tissues. The nucleic acid or nucleic acid complexes can be locally administered to relevant tissues ex vivo, or in vivo through local delivery to the lung, with or without their incorporation in biopolymers. In particular embodiments, the nucleic acid molecules of the invention comprise sequences shown in Tables II-III and/or FIGS. 4-5. Examples of such nucleic acid molecules consist essentially of sequences defined in these tables and figures. Furthermore, the chemically modified constructs described in Table IV can be applied to any siNA sequence of the invention.

[0350] In another aspect, the invention provides mammalian cells containing one or more siNA molecules of this invention. The one or more siNA molecules can independently be targeted to the same or different sites.

[0351] By “RNA” is meant a molecule comprising at least one ribonucleotide residue. By “ribonucleotide” is meant a nucleotide with a hydroxyl group at the 2′ position of a β-D-ribofuranose moiety. The terms include double-stranded RNA, single-stranded RNA, isolated RNA such as partially purified RNA, essentially pure RNA, synthetic RNA, recombinantly produced RNA, as well as altered RNA that differs from naturally occurring RNA by the addition, deletion, substitution and/or alteration of one or more nucleotides. Such alterations can include addition of non-nucleotide material, such as to the end(s) of the siNA or internally, for example at one or more nucleotides of the RNA. Nucleotides in the RNA molecules of the instant invention can also comprise non-standard nucleotides, such as non-naturally occurring nucleotides or chemically synthesized nucleotides or deoxynucleotides. These altered RNAs can be referred to as analogs or analogs of naturally-occurring RNA.

[0352] By “subject” is meant an organism, which is a donor or recipient of explanted cells or the cells themselves. “Subject” also refers to an organism to which the nucleic acid molecules of the invention can be administered. A subject can be a mammal or mammalian cells, including a human or human cells.

[0353] By “chemical modification” as used herein is meant any modification of chemical structure of the nucleotides that differs from nucleotides of native siRNA or RNA. The term “chemical modification” encompasses the addition, substitution, or modification of native siRNA or RNA nucleosides and nucleotides with modified nucleosides and modified nucleotides as described herein or as is otherwise known in the art. Non-limiting examples of such chemical modifications include without limitation phosphorothioate internucleotide linkages, 2′-deoxyribonucleotides, 2′-O-methyl ribonucleotides, 2′-deoxy-2′-fluoro ribonucleotides, 4′-thio ribonucleotides, 2′-O-trifluoromethyl nucleotides, 2′-O-ethyl-trifluoromethoxy nucleotides, 2′-O-difluoromethoxy-ethoxy nucleotides (see for example U.S. Ser. No. 10/981,966 filed Nov. 5, 2004, incorporated by reference herein), “universal base” nucleotides, “acyclic” nucleotides, 5-C-methyl nucleotides, terminal glyceryl and/or inverted deoxy abasic residue incorporation, or a modification having any of Formulae I-VII herein.

[0354] The term “phosphorothioate” as used herein refers to an internucleotide linkage having Formula I, wherein Z and/or W comprise a sulfur atom. Hence, the term phosphorothioate refers to both phosphorothioate and phosphorodithioate internucleotide linkages.

[0355] The term “phosphonoacetate” as used herein refers to an internucleotide linkage having Formula I, wherein Z and/or W comprise an acetyl or protected acetyl group.

[0356] The term “thiophosphonoacetate” as used herein refers to an internucleotide linkage having Formula I, wherein Z comprises an acetyl or protected acetyl group and W comprises a sulfur atom or alternately W comprises an acetyl or protected acetyl group and Z comprises a sulfur atom.

[0357] The term “universal base” as used herein refers to nucleotide base analogs that form base pairs with each of the natural DNA/RNA bases with little discrimination between them. Non-limiting examples of universal bases include C-phenyl, C-naphthyl and other aromatic derivatives, inosine, azole carboxamides, and nitroazole derivatives such as 3-nitropyrrole, 4-nitroindole, 5-nitroindole, and 6-nitroindole as known in the art (see for example Loakes, 2001, Nucleic Acids Research, 29, 2437-2447).

[0358] The term “acyclic nucleotide” as used herein refers to any nucleotide having an acyclic ribose sugar, for example where any of the ribose carbons (C1, C2, C3, C4, or C5), are independently or in combination absent from the nucleotide.

[0359] The nucleic acid molecules of the instant invention, individually, or in combination or in conjunction with other drugs, can be used to for preventing or treating diseases, disorders, conditions, and traits described herein or otherwise known in the art, in a subject or organism.

[0360] In one embodiment, the siNA molecules of the invention can be administered to a subject or can be administered to other appropriate cells evident to those skilled in the art, individually or in combination with one or more drugs under conditions suitable for the treatment.

[0361] In a further embodiment, the siNA molecules can be used in combination with other known treatments to prevent or treat in a subject or organism. For example, the described molecules could be used in combination with one or more known compounds, treatments, or procedures to prevent or treat diseases, disorders, conditions, and traits described herein in a subject or organism as are known in the art.

[0362] In one embodiment, the invention features an expression vector comprising a nucleic acid sequence encoding at least one siNA molecule of the invention, in a manner which allows expression of the siNA molecule. For example, the vector can contain sequence(s) encoding both strands of a siNA molecule comprising a duplex. The vector can also contain sequence(s) encoding a single nucleic acid molecule that is self-complementary and thus forms a siNA molecule. Non-limiting examples of such expression vectors are described in Paul et al., 2002, Nature Biotechnology, 19, 505; Miyagishi and Taira, 2002, Nature Biotechnology, 19, 497; Lee et al., 2002, Nature Biotechnology, 19, 500; and Novina et al., 2002, Nature Medicine, advance online publication doi:10.1038/nm725.

[0363] In another embodiment, the invention features a mammalian cell, for example, a human cell, including an expression vector of the invention.

[0364] In yet another embodiment, the expression vector of the invention comprises a sequence for a siNA molecule having complementarity to a RNA molecule referred to by a Genbank Accession numbers, for example Genbank Accession Nos. shown herein or in U.S. Ser. No. 10/923,536 and U.S. Ser. No. 10/923,536, both incorporated by reference herein.

[0365] In one embodiment, an expression vector of the invention comprises a nucleic acid sequence encoding two or more siNA molecules, which can be the same or different.

[0366] In another aspect of the invention, siNA molecules that interact with target RNA molecules and down-regulate gene encoding target RNA molecules (for example target RNA molecules referred to by Genbank Accession numbers herein) are expressed from transcription units inserted into DNA or RNA vectors. The recombinant vectors can be DNA plasmids or viral vectors. siNA expressing viral vectors can be constructed based on, but not limited to, adeno-associated virus, retrovirus, adenovirus, or alphavirus. The recombinant vectors capable of expressing the siNA molecules can be delivered as described herein, and persist in target cells. Alternatively, viral vectors can be used that provide for transient expression of siNA molecules. Such vectors can be repeatedly administered as necessary. Once expressed, the siNA molecules bind and down-regulate gene function or expression via RNA interference (RNAi). Delivery of siNA expressing vectors can be systemic, such as by intravenous or intramuscular administration, by administration to target cells ex-planted from a subject followed by reintroduction into the subject, or by any other means that would allow for introduction into the desired target cell.

[0367] By “vectors” is meant any nucleic acid- and/or viral-based technique used to deliver a desired nucleic acid

[0368] Other features and advantages of the invention will be apparent from the following description of the preferred embodiments thereof, and from the claims.

### BRIEF DESCRIPTION OF THE DRAWINGS

[0369] FIG. 1 shows a non-limiting example of a scheme for the synthesis of siNA molecules. The complementary siNA sequence strands, strand 1 and strand 2, are synthesized in tandem and are connected by a cleavable linkage, such as a nucleotide succinate or abasic succinate, which can be the same or different from the cleavable linker used for solid phase synthesis on a solid support. The synthesis can be either solid phase or solution phase, in the example shown, the synthesis is a solid phase synthesis. The synthesis is performed such that a protecting group, such as a dimethoxytrityl group, remains intact on the terminal nucleotide of the tandem oligonucleotide. Upon cleavage and deprotection of the oligonucleotide, the two siNA strands spontaneously hybridize to form a siNA duplex, which allows the purification of the duplex by utilizing the properties of the terminal protecting group, for example by applying a trityl on purification method wherein only duplexes/oligonucleotides with the terminal protecting group are isolated.

[0370] FIG. 2 shows a MALDI-TOF mass spectrum of a purified siNA duplex synthesized by a method of the invention. The two peaks shown correspond to the predicted mass of the separate siNA sequence strands. This result demonstrates that the siNA duplex generated from tandem synthesis can be purified as a single entity using a simple trityl-on purification methodology.

[0371] FIG. 3 shows a non-limiting proposed mechanistic representation of target RNA degradation involved in RNAi. Double-stranded RNA (dsRNA), which is generated by RNA-dependent RNA polymerase (RdRP) from foreign single-stranded RNA, for example viral, transposon, or other exogenous RNA, activates the DICER enzyme that in turn generates siNA duplexes. Alternately, synthetic or expressed siNA can be introduced directly into a cell by appropriate means. An active siNA complex forms which recognizes a target RNA, resulting in degradation of the target RNA by the RISC endonuclease complex or in the synthesis of additional RNA by RNA-dependent RNA polymerase (RdRP), which can activate DICER and result in additional siNA molecules, thereby amplifying the RNAi response.

[0372] FIG. 4A-F shows non-limiting examples of chemically-modified siNA constructs of the present invention. In the figure, N stands for any nucleotide (adenosine, guanosine, cytosine, uridine, or optionally thymidine, for example thymidine can be substituted in the overhanging regions designated by parenthesis (N N). Various modifications are shown for the sense and antisense strands of the siNA constructs. The (N N) nucleotide positions can be chemically modified as described herein (e.g., 2′-O-methyl, 2′-deoxy-2′-fluoro etc.) and can be either derived from a corresponding target nucleic acid sequence or not (see for example FIG. 6C). Furthermore, the sequences shown in FIG. 4 can optionally include a ribonucleotide at the 9^{th} position from the 5′-end of the sense strand or the 11^{th} position based on the 5′-end of the guide strand by counting 11 nucleotide positions in from the 5′-terminus of the guide strand (see FIG. 6C).

[0373] FIG. 4A: The sense strand comprises 21 nucleotides wherein the two terminal 3′-nucleotides are optionally base paired and wherein all nucleotides present are ribonucleotides except for (N N) nucleotides, which can comprise ribonucleotides, deoxynucleotides, universal bases, or other chemical modifications described herein. The antisense strand comprises 21 nucleotides, optionally having a 3′-terminal glyceryl moiety wherein the two terminal 3′-nucleotides are optionally complementary to the target RNA sequence, and wherein all nucleotides present are ribonucleotides except for (N N) nucleotides, which can comprise ribonucleotides, deoxynucleotides, universal bases, or other chemical modifications described herein. A modified internucleotide linkage, such as a phosphorothioate, phosphorodithioate or other modified internucleotide linkage as described herein, shown as “s”, optionally connects the (N N) nucleotides in the antisense strand.

[0374] FIG. 4B: The sense strand comprises 21 nucleotides wherein the two terminal 3′-nucleotides are optionally base paired and wherein all pyrimidine nucleotides that may be present are 2′deoxy-2′-fluoro modified nucleotides and all purine nucleotides that may be present are 2′-O-methyl modified nucleotides except for (N N) nucleotides, which can comprise ribonucleotides, deoxynucleotides, universal bases, or other chemical modifications described herein. The antisense strand comprises 21 nucleotides, optionally having a 3′-terminal glyceryl moiety and wherein the two terminal 3′-nucleotides are optionally complementary to the target RNA sequence, and wherein all pyrimidine nucleotides that may be present are 2′-deoxy-2′-fluoro modified nucleotides and all purine nucleotides that may be present are 2′-O-methyl modified nucleotides except for (N N) nucleotides, which can comprise ribonucleotides, deoxynucleotides, universal bases, or other chemical modifications described herein. A modified internucleotide linkage, such as a phosphorothioate, phosphorodithioate or other modified internucleotide linkage as described herein, shown as “s”, optionally connects the (N N) nucleotides in the sense and antisense strand.

[0375] FIG. 4C: The sense strand comprises 21 nucleotides having 5′- and 3′-terminal cap moieties wherein the two terminal 3′-nucleotides are optionally base paired and wherein all pyrimidine nucleotides that may be present are 2′-O-methyl or 2′-deoxy-2′-fluoro modified nucleotides except for (N N) nucleotides, which can comprise ribonucleotides, deoxynucleotides, universal bases, or other chemical modifications described herein. The antisense strand comprises 21 nucleotides, optionally having a 3′-terminal glyceryl moiety and wherein the two terminal 3′-nucleotides are optionally complementary to the target RNA sequence, and wherein all pyrimidine nucleotides that may be present are 2′-deoxy-2′-fluoro modified nucleotides except for (N N) nucleotides, which can comprise ribonucleotides, deoxynucleotides, universal bases, or other chemical modifications described herein. A modified internucleotide linkage, such as a phosphorothioate, phosphorodithioate or other modified internucleotide linkage as described herein, shown as “s”, optionally connects the (N N) nucleotides in the antisense strand.

[0376] FIG. 4D: The sense strand comprises 21 nucleotides having 5′- and 3′-terminal cap moieties wherein the two terminal 3′-nucleotides are optionally base paired and wherein all pyrimidine nucleotides that may be present are 2′-deoxy-2′-fluoro modified nucleotides except for (N N) nucleotides, which can comprise ribonucleotides, deoxynucleotides, universal bases, or other chemical modifications described herein and wherein and all purine nucleotides that may be present are 2′-deoxy nucleotides. The antisense strand comprises 21 nucleotides, optionally having a 3′-terminal glyceryl moiety and wherein the two terminal 3′-nucleotides are optionally complementary to the target RNA sequence, wherein all pyrimidine nucleotides that may be present are 2′-deoxy-2′-fluoro modified nucleotides and all purine nucleotides that may be present are 2′-O-methyl modified nucleotides except for (N N) nucleotides, which can comprise ribonucleotides, deoxynucleotides, universal bases, or other chemical modifications described herein. A modified internucleotide linkage, such as a phosphorothioate, phosphorodithioate or other modified internucleotide linkage as described herein, shown as “s”, optionally connects the (N N) nucleotides in the antisense strand.

[0377] FIG. 4E: The sense strand comprises 21 nucleotides having 5′- and 3′-terminal cap moieties wherein the two terminal 3′-nucleotides are optionally base paired and wherein all pyrimidine nucleotides that may be present are 2′-deoxy-2′-fluoro modified nucleotides except for (N N) nucleotides, which can comprise ribonucleotides, deoxynucleotides, universal bases, or other chemical modifications described herein. The antisense strand comprises 21 nucleotides, optionally having a 3′-terminal glyceryl moiety and wherein the two terminal 3′-nucleotides are optionally complementary to the target RNA sequence, and wherein all pyrimidine nucleotides that may be present are 2′-deoxy-2′-fluoro modified nucleotides and all purine nucleotides that may be present are 2′-O-methyl modified nucleotides except for (N N) nucleotides, which can comprise ribonucleotides, deoxynucleotides, universal bases, or other chemical modifications described herein. A modified internucleotide linkage, such as a phosphorothioate, phosphorodithioate or other modified internucleotide linkage as described herein, shown as “s”, optionally connects the (N N) nucleotides in the antisense strand.

[0378] FIG. 4F: The sense strand comprises 21 nucleotides having 5′- and 3′-terminal cap moieties wherein the two terminal 3′-nucleotides are optionally base paired and wherein all pyrimidine nucleotides that may be present are 2′-deoxy-2′-fluoro modified nucleotides except for (N N) nucleotides, which can comprise ribonucleotides, deoxynucleotides, universal bases, or other chemical modifications described herein and wherein and all purine nucleotides that may be present are 2′-deoxy nucleotides. The antisense strand comprises 21 nucleotides, optionally having a 3′-terminal glyceryl moiety and wherein the two terminal 3′-nucleotides are optionally complementary to the target RNA sequence, and having one 3′-terminal phosphorothioate internucleotide linkage and wherein all pyrimidine nucleotides that may be present are 2′-deoxy-2′-fluoro modified nucleotides and all purine nucleotides that may be present are 2′-deoxy nucleotides except for (N N) nucleotides, which can comprise ribonucleotides, deoxynucleotides, universal bases, or other chemical modifications described herein. A modified internucleotide linkage, such as a phosphorothioate, phosphorodithioate or other modified internucleotide linkage as described herein, shown as “s”, optionally connects the (N N) nucleotides in the antisense strand. The antisense strand of constructs A-F comprise sequence complementary to any target nucleic acid sequence of the invention. Furthermore, when a glyceryl moiety (L) is present at the 3′-end of the antisense strand for any construct shown in FIG. 4 A-F, the modified internucleotide linkage is optional.

[0379] FIG. 5A-F shows non-limiting examples of specific chemically-modified siNA sequences of the invention. A-F applies the chemical modifications described in FIG. 4A-F to an exemplary HCV siNA sequence. Such chemical modifications can be applied to any HCV sequence and/or cellular target sequence.

[0380] FIG. 6A-C shows non-limiting examples of different siNA constructs of the invention.

[0381] The examples shown in FIG. 6A (constructs 1, 2, and 3) have 19 representative base pairs; however, different embodiments of the invention include any number of base pairs described herein. Bracketed regions represent nucleotide overhangs, for example, comprising about 1, 2, 3, or 4 nucleotides in length, preferably about 2 nucleotides. Constructs 1 and 2 can be used independently for RNAi activity. Construct 2 can comprise a polynucleotide or non-nucleotide linker, which can optionally be designed as a biodegradable linker. In one embodiment, the loop structure shown in construct 2 can comprise a biodegradable linker that results in the formation of construct 1 in vivo and/or in vitro. In another example, construct 3 can be used to generate construct 2 under the same principle wherein a linker is used to generate the active siNA construct 2 in vivo and/or in vitro, which can optionally utilize another biodegradable linker to generate the active siNA construct 1 in vivo and/or in vitro. As such, the stability and/or activity of the siNA constructs can be modulated based on the design of the siNA construct for use in vivo or in vitro and/or in vitro.

[0382] The examples shown in FIG. 6B represent different variations of double stranded nucleic acid molecule of the invention, such as microRNA, that can include overhangs, bulges, loops, and stem-loops resulting from partial complementarity. Such motifs having bulges, loops, and stem-loops are generally characteristics of miRNA. The bulges, loops, and stem-loops can result from any degree of partial complementarity, such as mismatches or bulges of about 1, 2, 3, 4, 5, 6, 7, 8, 9, 10 or more nucleotides in one or both strands of the double stranded nucleic acid molecule of the invention.

[0383] The example shown in FIG. 6C represents a model double stranded nucleic acid molecule of the invention comprising a 19 base pair duplex of two 21 nucleotide sequences having dinucleotide 3′-overhangs. The top strand (1) represents the sense strand (passenger strand), the middle strand (2) represents the antisense (guide strand), and the lower strand (3) represents a target polynucleotide sequence. The dinucleotide overhangs (NN) can comprise sequence derived from the target polynucleotide. For example, the 3′-(NN) sequence in the guide strand can be complementary to the 5′-[NN] sequence of the target polynucleotide. In addition, the 5′-(NN) sequence of the passenger strand can comprise the same sequence as the 5′-[NN] sequence of the target polynucleotide sequence. In other embodiments, the overhangs (NN) are not derived from the target polynucleotide sequence, for example where the 3′-(NN) sequence in the guide strand are not complementary to the 5′-[NN] sequence of the target polynucleotide and the 5′-(NN) sequence of the passenger strand can comprise different sequence from the 5′-[NN] sequence of the target polynucleotide sequence. In additional embodiments, any (NN) nucleotides are chemically modified, e.g., as 2′-O-methyl, 2′-deoxy-2′-fluoro, and/or other modifications herein. Furthermore, the passenger strand can comprise a ribonucleotide position N of the passenger strand. For the representative 19 base pair 21 mer duplex shown, position N can be 9 nucleotides in from the 3′ end of the passenger strand. However, in duplexes of differing length, the position N is determined based on the 5′-end of the guide strand by counting 11 nucleotide positions in from the 5′-terminus of the guide strand and picking the corresponding base paired nucleotide in the passenger strand. Cleavage by Ago2 takes place between positions 10 and 11 as indicated by the arrow. In additional embodiments, there are two ribonucleotides, NN, at positions 10 and 11 based on the 5′-end of the guide strand by counting 10 and 11 nucleotide positions in from the 5′-terminus of the guide strand and picking the corresponding base paired nucleotides in the passenger strand.

[0384] FIG. 7A-C is a diagrammatic representation of a scheme utilized in generating an expression cassette to generate siNA hairpin constructs.

[0385] FIG. 7A: A DNA oligomer is synthesized with a 5′-restriction site (R1) sequence followed by a region having sequence identical (sense region of siNA) to a predetermined target sequence, wherein the sense region comprises, for example, about 19, 20, 21, or 22 nucleotides (N) in length, which is followed by a loop sequence of defined sequence (X), comprising, for example, about 3 to about 10 nucleotides.

[0386] FIG. 7B: The synthetic construct is then extended by DNA polymerase to generate a hairpin structure having self-complementary sequence that will result in a siNA transcript having specificity for a target sequence and having self-complementary sense and antisense regions.

[0387] FIG. 7C: The construct is heated (for example to about 95° C.) to linearize the sequence, thus allowing extension of a complementary second DNA strand using a primer to the 3′-restriction sequence of the first strand. The double-stranded DNA is then inserted into an appropriate vector for expression in cells. The construct can be designed such that a 3′-terminal nucleotide overhang results from the transcription, for example, by engineering restriction sites and/or utilizing a poly-U termination region as described in Paul et al., 2002, Nature Biotechnology, 29, 505-508.

[0388] FIG. 8A-C is a diagrammatic representation of a scheme utilized in generating an expression cassette to generate double-stranded siNA constructs.

[0389] FIG. 8A: A DNA oligomer is synthesized with a 5′-restriction (R1) site sequence followed by a region having sequence identical (sense region of siNA) to a predetermined target sequence, wherein the sense region comprises, for example, about 19, 20, 21, or 22 nucleotides (N) in length, and which is followed by a 3′-restriction site (R2) which is adjacent to a loop sequence of defined sequence (X).

[0390] FIG. 8B: The synthetic construct is then extended by DNA polymerase to generate a hairpin structure having self-complementary sequence.

[0391] FIG. 8C: The construct is processed by restriction enzymes specific to R1 and R2 to generate a double-stranded DNA which is then inserted into an appropriate vector for expression in cells. The transcription cassette is designed such that a U6 promoter region flanks each side of the dsDNA which generates the separate sense and antisense strands of the siNA. Poly T termination sequences can be added to the constructs to generate U overhangs in the resulting transcript.

[0392] FIG. 9A-E is a diagrammatic representation of a method used to determine target sites for siNA mediated RNAi within a particular target nucleic acid sequence, such as messenger RNA.

[0393] FIG. 9A: A pool of siNA oligonucleotides are synthesized wherein the antisense region of the siNA constructs has complementarity to target sites across the target nucleic acid sequence, and wherein the sense region comprises sequence complementary to the antisense region of the siNA.

[0394] FIGSS. 9B&C: (FIG. 9B) The sequences are pooled and are inserted into vectors such that (FIG. 9C) transfection of a vector into cells results in the expression of the siNA.

[0395] FIG. 9D: Cells are sorted based on phenotypic change that is associated with modulation of the target nucleic acid sequence.

[0396] FIG. 9E: The siNA is isolated from the sorted cells and is sequenced to identify efficacious target sites within the target nucleic acid sequence.

[0397] FIG. 10 shows non-limiting examples of different stabilization chemistries (1-10) that can be used, for example, to stabilize the 3′-end of siNA sequences of the invention, including (1) [3-3′]-inverted deoxyribose; (2) deoxyribonucleotide; (3) [5′-3′]-3′-deoxyribonucleotide; (4) [5′-3′]-ribonucleotide; (5) [5′-3′]-3′-O-methyl ribonucleotide; (6) 3′-glyceryl; (7) [3′-5′]-3′-deoxyribonucleotide; (8) [3′-3′]-deoxyribonucleotide; (9) [5′-2′]-deoxyribonucleotide; and (10) [5-3′]-dideoxyribonucleotide. In addition to modified and unmodified backbone chemistries indicated in the figure, these chemistries can be combined with different backbone modifications as described herein, for example, backbone modifications having Formula I. In addition, the 2′-deoxy nucleotide shown 5′ to the terminal modifications shown can be another modified or unmodified nucleotide or non-nucleotide described herein, for example modifications having any of Formulae I-VII or any combination thereof.

[0398] FIG. 11 shows a non-limiting example of a strategy used to identify chemically modified siNA constructs of the invention that are nuclease resistance while preserving the ability to mediate RNAi activity. Chemical modifications are introduced into the siNA construct based on educated design parameters (e.g. introducing 2′-mofications, base modifications, backbone modifications, terminal cap modifications etc). The modified construct in tested in an appropriate system (e.g. human serum for nuclease resistance, shown, or an animal model for PK/delivery parameters). In parallel, the siNA construct is tested for RNAi activity, for example in a cell culture system such as a luciferase reporter assay). Lead siNA constructs are then identified which possess a particular characteristic while maintaining RNAi activity, and can be further modified and assayed once again. This same approach can be used to identify siNA-conjugate molecules with improved pharmacokinetic profiles, delivery, and RNAi activity.

[0399] FIG. 12 shows non-limiting examples of phosphorylated siNA molecules of the invention, including linear and duplex constructs and asymmetric derivatives thereof.

[0400] FIG. 13 shows non-limiting examples of chemically modified terminal phosphate groups of the invention.

[0401] FIG. 14A shows a non-limiting example of methodology used to design self complementary DFO constructs utilizing palindrome and/or repeat nucleic acid sequences that are identified in a target nucleic acid sequence. (i) A palindrome or repeat sequence is identified in a nucleic acid target sequence. (ii) A sequence is designed that is complementary to the target nucleic acid sequence and the palindrome sequence. (iii) An inverse repeat sequence of the non-palindrome/repeat portion of the complementary sequence is appended to the 3′-end of the complementary sequence to generate a self complementary DFO molecule comprising sequence complementary to the nucleic acid target. (iv) The DFO molecule can self-assemble to form a double stranded oligonucleotide. FIG. 14B shows a non-limiting representative example of a duplex forming oligonucleotide sequence. FIG. 14C shows a non-limiting example of the self assembly schematic of a representative duplex forming oligonucleotide sequence. FIG. 14D shows a non-limiting example of the self assembly schematic of a representative duplex forming oligonucleotide sequence followed by interaction with a target nucleic acid sequence resulting in modulation of gene expression.

[0402] FIG. 15 shows a non-limiting example of the design of self complementary DFO constructs utilizing palindrome and/or repeat nucleic acid sequences that are incorporated into the DFO constructs that have sequence complementary to any target nucleic acid sequence of interest. Incorporation of these palindrome/repeat sequences allow the design of DFO constructs that form duplexes in which each strand is capable of mediating modulation of target gene expression, for example by RNAi. First, the target sequence is identified. A complementary sequence is then generated in which nucleotide or non-nucleotide modifications (shown as X or Y) are introduced into the complementary sequence that generate an artificial palindrome (shown as XYXYXY in the Figure). An inverse repeat of the non-palindrome/repeat complementary sequence is appended to the 3′-end of the complementary sequence to generate a self complementary DFO comprising sequence complementary to the nucleic acid target. The DFO can self-assemble to form a double stranded oligonucleotide.

[0403] FIG. 16 shows non-limiting examples of multifunctional siNA molecules of the invention comprising two separate polynucleotide sequences that are each capable of mediating RNAi directed cleavage of differing target nucleic acid sequences. FIG. 16A shows a non-limiting example of a multifunctional siNA molecule having a first region that is complementary to a first target nucleic acid sequence (complementary region 1) and a second region that is complementary to a second target nucleic acid sequence (complementary region 2), wherein the first and second complementary regions are situated at the 3′-ends of each polynucleotide sequence in the multifunctional siNA. The dashed portions of each polynucleotide sequence of the multifunctional siNA construct have complementarity with regard to corresponding portions of the siNA duplex, but do not have complementarity to the target nucleic acid sequences. FIG. 16B shows a non-limiting example of a multifunctional siNA molecule having a first region that is complementary to a first target nucleic acid sequence (complementary region 1) and a second region that is complementary to a second target nucleic acid sequence (complementary region 2), wherein the first and second complementary regions are situated at the 5′-ends of each polynucleotide sequence in the multifunctional siNA. The dashed portions of each polynucleotide sequence of the multifunctional siNA construct have complementarity with regard to corresponding portions of the siNA duplex, but do not have complementarity to the target nucleic acid sequences.

[0404] FIG. 17 shows non-limiting examples of multifunctional siNA molecules of the invention comprising a single polynucleotide sequence comprising distinct regions that are each capable of mediating RNAi directed cleavage of differing target nucleic acid sequences. FIG. 17A shows a non-limiting example of a multifunctional siNA molecule having a first region that is complementary to a first target nucleic acid sequence (complementary region 1) and a second region that is complementary to a second target nucleic acid sequence (complementary region 2), wherein the second complementary region is situated at the 3′-end of the polynucleotide sequence in the multifunctional siNA. The dashed portions of each polynucleotide sequence of the multifunctional siNA construct have complementarity with regard to corresponding portions of the siNA duplex, but do not have complementarity to the target nucleic acid sequences. FIG. 17B shows a non-limiting example of a multifunctional siNA molecule having a first region that is complementary to a first target nucleic acid sequence (complementary region 1) and a second region that is complementary to a second target nucleic acid sequence (complementary region 2), wherein the first complementary region is situated at the 5′-end of the polynucleotide sequence in the multifunctional siNA. The dashed portions of each polynucleotide sequence of the multifunctional siNA construct have complementarity with regard to corresponding portions of the siNA duplex, but do not have complementarity to the target nucleic acid sequences. In one embodiment, these multifunctional siNA constructs are processed in vivo or in vitro to generate multifunctional siNA constructs as shown in FIG. 16.

[0405] FIG. 18 shows non-limiting examples of multifunctional siNA molecules of the invention comprising two separate polynucleotide sequences that are each capable of mediating RNAi directed cleavage of differing target nucleic acid sequences and wherein the multifunctional siNA construct further comprises a self complementary, palindrome, or repeat region, thus enabling shorter bifuctional siNA constructs that can mediate RNA interference against differing target nucleic acid sequences. FIG. 18A shows a non-limiting example of a multifunctional siNA molecule having a first region that is complementary to a first target nucleic acid sequence (complementary region 1) and a second region that is complementary to a second target nucleic acid sequence (complementary region 2), wherein the first and second complementary regions are situated at the 3′-ends of each polynucleotide sequence in the multifunctional siNA, and wherein the first and second complementary regions further comprise a self complementary, palindrome, or repeat region. The dashed portions of each polynucleotide sequence of the multifunctional siNA construct have complementarity with regard to corresponding portions of the siNA duplex, but do not have complementarity to the target nucleic acid sequences. FIG. 18B shows a non-limiting example of a multifunctional siNA molecule having a first region that is complementary to a first target nucleic acid sequence (complementary region 1) and a second region that is complementary to a second target nucleic acid sequence (complementary region 2), wherein the first and second complementary regions are situated at the 5′-ends of each polynucleotide sequence in the multifunctional siNA, and wherein the first and second complementary regions further comprise a self complementary, palindrome, or repeat region. The dashed portions of each polynucleotide sequence of the multifunctional siNA construct have complementarity with regard to corresponding portions of the siNA duplex, but do not have complementarity to the target nucleic acid sequences.

[0406] FIG. 19 shows non-limiting examples of multifunctional siNA molecules of the invention comprising a single polynucleotide sequence comprising distinct regions that are each capable of mediating RNAi directed cleavage of differing target nucleic acid sequences and wherein the multifunctional siNA construct further comprises a self complementary, palindrome, or repeat region, thus enabling shorter bifuctional siNA constructs that can mediate RNA interference against differing target nucleic acid sequences. FIG. 19A shows a non-limiting example of a multifunctional siNA molecule having a first region that is complementary to a first target nucleic acid sequence (complementary region 1) and a second region that is complementary to a second target nucleic acid sequence (complementary region 2), wherein the second complementary region is situated at the 3′-end of the polynucleotide sequence in the multifunctional siNA, and wherein the first and second complementary regions further comprise a self complementary, palindrome, or repeat region. The dashed portions of each polynucleotide sequence of the multifunctional siNA construct have complementarity with regard to corresponding portions of the siNA duplex, but do not have complementarity to the target nucleic acid sequences. FIG. 19B shows a non-limiting example of a multifunctional siNA molecule having a first region that is complementary to a first target nucleic acid sequence (complementary region 1) and a second region that is complementary to a second target nucleic acid sequence (complementary region 2), wherein the first complementary region is situated at the 5′-end of the polynucleotide sequence in the multifunctional siNA, and wherein the first and second complementary regions further comprise a self complementary, palindrome, or repeat region. The dashed portions of each polynucleotide sequence of the multifunctional siNA construct have complementarity with regard to corresponding portions of the siNA duplex, but do not have complementarity to the target nucleic acid sequences. In one embodiment, these multifunctional siNA constructs are processed in vivo or in vitro to generate multifunctional siNA constructs as shown in FIG. 18.

[0407] FIG. 20 shows a non-limiting example of how multifunctional siNA molecules of the invention can target two separate target nucleic acid molecules, such as separate RNA molecules encoding differing proteins, for example, a cytokine and its corresponding receptor, differing viral strains, a virus and a cellular protein involved in viral infection or replication, or differing proteins involved in a common or divergent biologic pathway that is implicated in the maintenance of progression of disease. Each strand of the multifunctional siNA construct comprises a region having complementarity to separate target nucleic acid molecules. The multifunctional siNA molecule is designed such that each strand of the siNA can be utilized by the RISC complex to initiate RNA interference mediated cleavage of its corresponding target. These design parameters can include destabilization of each end of the siNA construct (see for example Schwarz et al., 2003, Cell, 115, 199-208). Such destabilization can be accomplished for example by using guanosine-cytidine base pairs, alternate base pairs (e.g., wobbles), or destabilizing chemically modified nucleotides at terminal nucleotide positions as is known in the art.

[0408] FIG. 21 shows a non-limiting example of how multifunctional siNA molecules of the invention can target two separate target nucleic acid sequences within the same target nucleic acid molecule, such as alternate coding regions of a RNA, coding and non-coding regions of a RNA, or alternate splice variant regions of a RNA. Each strand of the multifunctional siNA construct comprises a region having complementarity to the separate regions of the target nucleic acid molecule. The multifunctional siNA molecule is designed such that each strand of the siNA can be utilized by the RISC complex to initiate RNA interference mediated cleavage of its corresponding target region. These design parameters can include destabilization of each end of the siNA construct (see for example Schwarz et al., 2003, Cell, 115, 199-208). Such destabilization can be accomplished for example by using guanosine-cytidine base pairs, alternate base pairs (e.g., wobbles), or destabilizing chemically modified nucleotides at terminal nucleotide positions as is known in the art.

[0409] FIG. 22(A-H) shows non-limiting examples of tethered multifunctional siNA constructs of the invention. In the examples shown, a linker (e.g., nucleotide or non-nucleotide linker) connects two siNA regions (e.g., two sense, two antisense, or alternately a sense and an antisense region together. Separate sense (or sense and antisense) sequences corresponding to a first target sequence and second target sequence are hybridized to their corresponding sense and/or antisense sequences in the multifunctional siNA. In addition, various conjugates, ligands, aptamers, polymers or reporter molecules can be attached to the linker region for selective or improved delivery and/or pharmacokinetic properties.

[0410] FIG. 23 shows a non-limiting example of various dendrimer based multifunctional siNA designs.

[0411] FIG. 24 shows a non-limiting example of various supramolecular multifunctional siNA designs.

[0412] FIG. 25 shows a non-limiting example of a dicer enabled multifunctional siNA design using a 30 nucleotide precursor siNA construct. A 30 base pair duplex is cleaved by Dicer into 22 and 8 base pair products from either end (8 b.p. fragments not shown). For ease of presentation the overhangs generated by dicer are not shown—but can be compensated for. Three targeting sequences are shown. The required sequence identity overlapped is indicated by grey boxes. The N's of the parent 30 b.p. siNA are suggested sites of 2′-OH positions to enable Dicer cleavage if this is tested in stabilized chemistries. Note that processing of a 30mer duplex by Dicer RNase III does not give a precise 22+8 cleavage, but rather produces a series of closely related products (with 22+8 being the primary site). Therefore, processing by Dicer will yield a series of active siNAs.

[0413] FIG. 26 shows a non-limiting example of a dicer enabled multifunctional siNA design using a 40 nucleotide precursor siNA construct. A 40 base pair duplex is cleaved by Dicer into 20 base pair products from either end. For ease of presentation the overhangs generated by dicer are not shown—but can be compensated for. Four targeting sequences are shown. The target sequences having homology are enclosed by boxes. This design format can be extended to larger RNAs. If chemically stabilized siNAs are bound by Dicer, then strategically located ribonucleotide linkages can enable designer cleavage products that permit our more extensive repertoire of multiifunctional designs. For example cleavage products not limited to the Dicer standard of approximately 22-nucleotides can allow multifunctional siNA constructs with a target sequence identity overlap ranging from, for example, about 3 to about 15 nucleotides.

[0414] FIG. 27 shows a non-limiting example of additional multifunctional siNA construct designs of the invention. In one example, a conjugate, ligand, aptamer, label, or other moiety is attached to a region of the multifunctional siNA to enable improved delivery or pharmacokinetic profiling.

[0415] FIG. 28 shows a non-limiting example of additional multifunctional siNA construct designs of the invention. In one example, a conjugate, ligand, aptamer, label, or other moiety is attached to a region of the multifunctional siNA to enable improved delivery or pharmacokinetic profiling.

[0416] FIG. 29 shows a non-limiting example of a cholesterol linked phosphoramidite that can be used to synthesize cholesterol conjugated siNA molecules of the invention. An example is shown with the cholesterol moiety linked to the 5′-end of the sense strand of a siNA molecule.

[0417] FIG. 30 shows a non-limiting example of a double stranded nucleic acid molecule cocktail formulation targeting GBV-B in a marmoset model of HCV infection. GBV-B provides a small animal model for testing antiviral compounds and vaccines for HCV infection. Two animals were inoculated with GBV-B and IV treatment with the active formulated siNA (Sirna Compound Nos. 33149/35180 and 31703/35176, Formulation LNP-086; see Tables III and VI) at 3 mg/kg was initiated one day post infection. Another 2 animals were inoculated with GBV-B and were untreated to serve as negative controls. The animals were monitored to determine the effect of the therapy of GBV-B infection. Blood draws were performed over the course of the study to determine viral titers. Dosing of formulated siNA in the treated animals was repeated at days 1, 3, and 7 after inoculation at day 0. As shown in the figure, these animals show a profound inhibition of GBV-B over a three week time course compared to the untreated control animals.

[0418] FIG. 31 shows a non-limiting example of inhibition of GBV infection in an animal with established GBV infection that was treated with active formulated siNA (Sirna Compound Nos. 33149/38758 and 31703/38759, Formulation LNP-086; see Tables III and VI) at days 28, 31, and 35 post infection. This animal showed a decrease in viral titer down to the limit of detection following the dosing of active compound compared to historic untreated controls.

### DETAILED DESCRIPTION OF THE INVENTION

Mechanism of Action of Nucleic Acid Molecules of the Invention

[0419] The discussion that follows discusses the proposed mechanism of RNA interference mediated by short interfering RNA as is presently known, and is not meant to be limiting and is not an admission of prior art. Applicant demonstrates herein that chemically-modified short interfering nucleic acids possess similar or improved capacity to mediate RNAi as do siRNA molecules and are expected to possess improved stability and activity in vivo; therefore, this discussion is not meant to be limiting only to siRNA and can be applied to siNA as a whole. By “improved capacity to mediate RNAi” or “improved RNAi activity” is meant to include RNAi activity measured in vitro and/or in vivo where the RNAi activity is a reflection of both the ability of the siNA to mediate RNAi and the stability of the siNAs of the invention. In this invention, the product of these activities can be increased in vitro and/or in vivo compared to an all RNA siRNA or a siNA containing a plurality of ribonucleotides. In some cases, the activity or stability of the siNA molecule can be decreased (i.e., less than ten-fold), but the overall activity of the siNA molecule is enhanced in vitro and/or in vivo.

[0420] RNA interference refers to the process of sequence specific post-transcriptional gene silencing in animals mediated by short interfering RNAs (siRNAs) (Fire et al., 1998, Nature, 391, 806). The corresponding process in plants is commonly referred to as post-transcriptional gene silencing or RNA silencing and is also referred to as quelling in fungi. The process of post-transcriptional gene silencing is thought to be an evolutionarily-conserved cellular defense mechanism used to prevent the expression of foreign genes which is commonly shared by diverse flora and phyla (Fire et al., 1999, Trends Genet., 15, 358). Such protection from foreign gene expression may have evolved in response to the production of double-stranded RNAs (dsRNAs) derived from viral infection or the random integration of transposon elements into a host genome via a cellular response that specifically destroys homologous single-stranded RNA or viral genomic RNA. The presence of dsRNA in cells triggers the RNAi response though a mechanism that has yet to be fully characterized. This mechanism appears to be different from the interferon response that results from dsRNA-mediated activation of protein kinase PKR and 2′,5′-oligoadenylate synthetase resulting in non-specific cleavage of mRNA by ribonuclease L.

[0421] The presence of long dsRNAs in cells stimulates the activity of a ribonuclease III enzyme referred to as Dicer. Dicer is involved in the processing of the dsRNA into short pieces of dsRNA known as short interfering RNAs (siRNAs) (Berstein et al., 2001, Nature, 409, 363). Short interfering RNAs derived from Dicer activity are typically about 21 to about 23 nucleotides in length and comprise about 19 base pair duplexes. Dicer has also been implicated in the excision of 21- and 22-nucleotide small temporal RNAs (stRNAs) from precursor RNA of conserved structure that are implicated in translational control (Hutvagner et al., 2001, Science, 293, 834). The RNAi response also features an endonuclease complex containing a siRNA, commonly referred to as an RNA-induced silencing complex (RISC), which mediates cleavage of single-stranded RNA having sequence homologous to the siRNA. Cleavage of the target RNA takes place in the middle of the region complementary to the guide sequence of the siRNA duplex (Elbashir et al., 2001, Genes Dev., 15, 188). In addition, RNA interference can also involve small RNA (e.g., micro-RNA or miRNA) mediated gene silencing, presumably though cellular mechanisms that regulate chromatin structure and thereby prevent transcription of target gene sequences (see for example Allshire, 2002, Science, 297, 1818-1819; Volpe et al., 2002, Science, 297, 1833-1837; Jenuwein, 2002, Science, 297, 2215-2218; and Hall et al., 2002, Science, 297, 2232-2237). As such, siNA molecules of the invention can be used to mediate gene silencing via interaction with RNA transcripts or alternately by interaction with particular gene sequences, wherein such interaction results in gene silencing either at the transcriptional level or post-transcriptional level.

[0422] RNAi has been studied in a variety of systems. Fire et al., 1998, Nature, 391, 806, were the first to observe RNAi in C. elegans. Wianny and Goetz, 1999, Nature Cell Biol., 2, 70, describe RNAi mediated by dsRNA in mouse embryos. Hammond et al., 2000, Nature, 404, 293, describe RNAi in Drosophila cells transfected with dsRNA. Elbashir et al., 2001, Nature, 411, 494, describe RNAi induced by introduction of duplexes of synthetic 21- nucleotide RNAs in cultured mammalian cells including human embryonic kidney and HeLa cells. Recent work in Drosophila embryonic lysates has revealed certain requirements for siRNA length, structure, chemical composition, and sequence that are essential to mediate efficient RNAi activity. These studies have shown that 21 nucleotide siRNA duplexes are most active when containing two 2-nucleotide 3′-terminal nucleotide overhangs. Furthermore, substitution of one or both siRNA strands with 2′-deoxy or 2′-O-methyl nucleotides abolishes RNAi activity, whereas substitution of 3′-terminal siRNA nucleotides with deoxy nucleotides was shown to be tolerated. Mismatch sequences in the center of the siRNA duplex were also shown to abolish RNAi activity. In addition, these studies also indicate that the position of the cleavage site in the target RNA is defined by the 5′-end of the siRNA guide sequence rather than the 3′-end (Elbashir et al., 2001, EMBO J, 20, 6877). Other studies have indicated that a 5′-phosphate on the target-complementary strand of a siRNA duplex is required for siRNA activity and that ATP is utilized to maintain the 5′-phosphate moiety on the siRNA (Nykanen et al., 2001, Cell, 107, 309); however, siRNA molecules lacking a 5′-phosphate are active when introduced exogenously, suggesting that 5′-phosphorylation of siRNA constructs may occur in vivo.

Duplex Forming Oligonucleotides (DFO) of the Invention

[0423] In one embodiment, the invention features siNA molecules comprising duplex forming oligonucleotides (DFO) that can self-assemble into double stranded oligonucleotides. The duplex forming oligonucleotides of the invention can be chemically synthesized or expressed from transcription units and/or vectors. The DFO molecules of the instant invention provide useful reagents and methods for a variety of therapeutic, diagnostic, agricultural, veterinary, target validation, genomic discovery, genetic engineering and pharmacogenomic applications.

[0424] Applicant demonstrates herein that certain oligonucleotides, refered to herein for convenience but not limitation as duplex forming oligonucleotides or DFO molecules, are potent mediators of sequence specific regulation of gene expression. The oligonucleotides of the invention are distinct from other nucleic acid sequences known in the art (e.g., siRNA, miRNA, stRNA, shRNA, antisense oligonucleotides etc.) in that they represent a class of linear polynucleotide sequences that are designed to self-assemble into double stranded oligonucleotides, where each strand in the double stranded oligonucleotides comprises a nucleotide sequence that is complementary to a HCV target nucleic acid molecule. Nucleic acid molecules of the invention can thus self assemble into functional duplexes in which each strand of the duplex comprises the same polynucleotide sequence and each strand comprises a nucleotide sequence that is complementary to a HCV target nucleic acid molecule.

[0425] Generally, double stranded oligonucleotides are formed by the assembly of two distinct oligonucleotide sequences where the oligonucleotide sequence of one strand is complementary to the oligonucleotide sequence of the second strand; such double stranded oligonucleotides are assembled from two separate oligonucleotides, or from a single molecule that folds on itself to form a double stranded structure, often referred to in the field as hairpin stem-loop structure (e.g., shRNA or short hairpin RNA). These double stranded oligonucleotides known in the art all have a common feature in that each strand of the duplex has a distict nucleotide sequence.

[0426] Distinct from the double stranded nucleic acid molecules known in the art, the applicants have developed a novel, potentially cost effective and simplified method of forming a double stranded nucleic acid molecule starting from a single stranded or linear oligonucleotide. The two strands of the double stranded oligonucleotide formed according to the instant invention have the same nucleotide sequence and are not covalently linked to each other. Such double-stranded oligonucleotides molecules can be readily linked post-synthetically by methods and reagents known in the art and are within the scope of the invention. In one embodiment, the single stranded oligonucleotide of the invention (the duplex forming oligonucleotide) that forms a double stranded oligonucleotide comprises a first region and a second region, where the second region includes a nucleotide sequence that is an inverted repeat of the nucleotide sequence in the first region, or a portion thereof, such that the single stranded oligonucleotide self assembles to form a duplex oligonucleotide in which the nucleotide sequence of one strand of the duplex is the same as the nucleotide sequence of the second strand. Non-limiting examples of such duplex forming oligonucleotides are illustrated in FIGS. 14 and 15. These duplex forming oligonucleotides (DFOs) can optionally include certain palindrome or repeat sequences where such palindrome or repeat sequences are present in between the first region and the second region of the DFO.

[0427] In one embodiment, the invention features a duplex forming oligonucleotide (DFO) molecule, wherein the DFO comprises a duplex forming self complementary nucleic acid sequence that has nucleotide sequence complementary to a HCV target nucleic acid sequence. The DFO molecule can comprise a single self complementary sequence or a duplex resulting from assembly of such self complementary sequences.

[0428] In one embodiment, a duplex forming oligonucleotide (DFO) of the invention comprises a first region and a second region, wherein the second region comprises a nucleotide sequence comprising an inverted repeat of nucleotide sequence of the first region such that the DFO molecule can assemble into a double stranded oligonucleotide. Such double stranded oligonucleotides can act as a short interfering nucleic acid (siNA) to modulate gene expression. Each strand of the double stranded oligonucleotide duplex formed by DFO molecules of the invention can comprise a nucleotide sequence region that is complementary to the same nucleotide sequence in a HCV target nucleic acid molecule (e.g., HCV target RNA).

[0429] In one embodiment, the invention features a single stranded DFO that can assemble into a double stranded oligonucleotide. The applicant has surprisingly found that a single stranded oligonucleotide with nucleotide regions of self complementarity can readily assemble into duplex oligonucleotide constructs. Such DFOs can assemble into duplexes that can inhibit gene expression in a sequence specific manner. The DFO moleucles of the invention comprise a first region with nucleotide sequence that is complementary to the nucleotide sequence of a second region and where the sequence of the first region is complementary to a HCV target nucleic acid (e.g., RNA). The DFO can form a double stranded oligonucleotide wherein a portion of each strand of the double stranded oligonucleotide comprises a sequence complementary to a HCV target nucleic acid sequence.

[0430] In one embodiment, the invention features a double stranded oligonucleotide, wherein the two strands of the double stranded oligonucleotide are not covalently linked to each other, and wherein each strand of the double stranded oligonucleotide comprises a nucleotide sequence that is complementary to the same nucleotide sequence in a HCV target nucleic acid molecule or a portion thereof (e.g., HCV RNA target). In another embodiment, the two strands of the double stranded oligonucleotide share an identical nucleotide sequence of at least about 15, preferably at least about 16, 17, 18, 19, 20, or 21 nucleotides.

[0431] In one embodiment, a DFO molecule of the invention comprises a structure having Formula DFO-I:

5′-p-X Z X′-3′

wherein Z comprises a palindromic or repeat nucleic acid sequence optionally with one or more modified nucleotides (e.g., nucleotide with a modified base, such as 2-amino purine, 2-amino-1,6-dihydro purine or a universal base), for example of length about 2 to about 24 nucleotides in even numbers (e.g., about 2, 4, 6, 8, 10, 12, 14, 16, 18, 20, or 22 or 24 nucleotides), X represents a nucleic acid sequence, for example of length of about 1 to about 21 nucleotides (e.g., about 1, 2, 3, 4, 5, 6, 7, 8, 9, 10, 11, 12, 13, 14, 15, 16, 17, 18, 19, 20, or 21 nucleotides), X′ comprises a nucleic acid sequence, for example of length about 1 and about 21 nucleotides (e.g., about 1, 2, 3, 4, 5, 6, 7, 8, 9, 10, 11, 12, 13, 14, 15, 16, 17, 18, 19, 20 or 21 nucleotides) having nucleotide sequence complementarity to sequence X or a portion thereof, p comprises a terminal phosphate group that can be present or absent, and wherein sequence X and Z, either independently or together, comprise nucleotide sequence that is complementary to a HCV target nucleic acid sequence or a portion thereof and is of length sufficient to interact (e.g., base pair) with the HCV target nucleic acid sequence or a portion thereof (e.g., HCV RNA target). For example, X independently can comprise a sequence from about 12 to about 21 or more (e.g., about 12, 13, 14, 15, 16, 17, 18, 19, 20, 21, or more) nucleotides in length that is complementary to nucleotide sequence in a HCV target RNA or a portion thereof. In another non-limiting example, the length of the nucleotide sequence of X and Z together, when X is present, that is complementary to the HCV target RNA or a portion thereof (e.g., HCV RNA target) is from about 12 to about 21 or more nucleotides (e.g., about 12, 13, 14, 15, 16, 17, 18, 19, 20, 21, or more). In yet another non-limiting example, when X is absent, the length of the nucleotide sequence of Z that is complementary to the HCV target RNA or a portion thereof is from about 12 to about 24 or more nucleotides (e.g., about 12, 14, 16, 18, 20, 22, 24, or more). In one embodiment X, Z and X′ are independently oligonucleotides, where X and/or Z comprises a nucleotide sequence of length sufficient to interact (e.g., base pair) with a nucleotide sequence in the HCV target RNA or a portion thereof (e.g., HCV RNA target). In one embodiment, the lengths of oligonucleotides X and X′ are identical. In another embodiment, the lengths of oligonucleotides X and X′ are not identical. In another embodiment, the lengths of oligonucleotides X and Z, or Z and X′, or X, Z and X′ are either identical or different.

[0432] When a sequence is described in this specification as being of “sufficient” length to interact (i.e., base pair) with another sequence, it is meant that the the length is such that the number of bonds (e.g., hydrogen bonds) formed between the two sequences is enough to enable the two sequence to form a duplex under the conditions of interest. Such conditions can be in vitro (e.g., for diagnostic or assay purposes) or in vivo (e.g., for therapeutic purposes). It is a simple and routine matter to determine such lengths.

[0433] In one embodiment, the invention features a double stranded oligonucleotide construct having Formula DFO-I(a):

5′-p-X Z X′-3′
3′-X′ Z X-p-5′

wherein Z comprises a palindromic or repeat nucleic acid sequence or palindromic or repeat-like nucleic acid sequence with one or more modified nucleotides (e.g., nucleotides with a modified base, such as 2-amino purine, 2-amino-1,6-dihydro purine or a universal base), for example of length about 2 to about 24 nucleotides in even numbers (e.g., about 2, 4, 6, 8, 10, 12, 14, 16, 18, 20, 22 or 24 nucleotides), X represents a nucleic acid sequence, for example of length about 1 to about 21 nucleotides (e.g., about 1, 2, 3, 4, 5, 6, 7, 8, 9, 10, 11, 12, 13, 14, 15, 16, 17, 18, 19, 20, or 21 nucleotides), X′ comprises a nucleic acid sequence, for example of length about 1 to about 21 nucleotides (e.g., about 1, 2, 3, 4, 5, 6, 7, 8, 9, 10, 11, 12, 13, 14, 15, 16, 17, 18, 19, 20 or 21 nucleotides) having nucleotide sequence complementarity to sequence X or a portion thereof, p comprises a terminal phosphate group that can be present or absent, and wherein each X and Z independently comprises a nucleotide sequence that is complementary to a HCV target nucleic acid sequence or a portion thereof (e.g., HCV RNA target) and is of length sufficient to interact with the HCV target nucleic acid sequence of a portion thereof (e.g., HCV RNA target). For example, sequence X independently can comprise a sequence from about 12 to about 21 or more nucleotides (e.g., about 12, 13, 14, 15, 16, 17, 18, 19, 20, 21, or more) in length that is complementary to a nucleotide sequence in a HCV target RNA or a portion thereof (e.g., HCV RNA target). In another non-limiting example, the length of the nucleotide sequence of X and Z together (when X is present) that is complementary to the HCV target RNA or a portion thereof is from about 12 to about 21 or more nucleotides (e.g., about 12, 13, 14, 15, 16, 17, 18, 19, 20, 21, or more). In yet another non-limiting example, when X is absent, the length of the nucleotide sequence of Z that is complementary to the HCV target RNA or a portion thereof is from about 12 to about 24 or more nucleotides (e.g., about 12, 14, 16, 18, 20, 22, 24 or more). In one embodiment X, Z and X′ are independently oligonucleotides, where X and/or Z comprises a nucleotide sequence of length sufficient to interact (e.g., base pair) with nucleotide sequence in the HCV target RNA or a portion thereof (e.g., HCV RNA target). In one embodiment, the lengths of oligonucleotides X and X′ are identical. In another embodiment, the lengths of oligonucleotides X and X′ are not identical. In another embodiment, the lengths of oligonucleotides X and Z or Z and X′ or X, Z and X′ are either identical or different. In one embodiment, the double stranded oligonucleotide construct of Formula I(a) includes one or more, specifically 1, 2, 3 or 4, mismatches, to the extent such mismatches do not significantly diminish the ability of the double stranded oligonucleotide to inhibit HCV target gene expression.

[0434] In one embodiment, a DFO molecule of the invention comprises structure having Formula DFO-II:

5′-p-X X′-3′

wherein each X and X′ are independently oligonucleotides of length about 12 nucleotides to about 21 nucleotides, wherein X comprises, for example, a nucleic acid sequence of length about 12 to about 21 nucleotides (e.g., about 12, 13, 14, 15, 16, 17, 18, 19, 20 or 21 nucleotides), X′ comprises a nucleic acid sequence, for example of length about 12 to about 21 nucleotides (e.g., about 12, 13, 14, 15, 16, 17, 18, 19, 20, or 21 nucleotides) having nucleotide sequence complementarity to sequence X or a portion thereof, p comprises a terminal phosphate group that can be present or absent, and wherein X comprises a nucleotide sequence that is complementary to a HCV target nucleic acid sequence (e.g., HCV target RNA) or a portion thereof and is of length sufficient to interact (e.g., base pair) with the HCV target nucleic acid sequence of a portion thereof. In one embodiment, the length of oligonucleotides X and X′ are identical. In another embodiment the length of oligonucleotides X and X′ are not identical. In one embodiment, length of the oligonucleotides X and X′ are sufficint to form a relatively stable double stranded oligonucleotide.

[0435] In one embodiment, the invention features a double stranded oligonucleotide construct having Formula DFO-II(a):

5′-p-X X′-3′
3′-X′ X-p-5′

wherein each X and X′ are independently oligonucleotides of length about 12 nucleotides to about 21 nucleotides, wherein X comprises a nucleic acid sequence, for example of length about 12 to about 21 nucleotides (e.g., about 12, 13, 14, 15, 16, 17, 18, 19, 20 or 21 nucleotides), X′ comprises a nucleic acid sequence, for example of length about 12 to about 21 nucleotides (e.g., about 12, 13, 14, 15, 16, 17, 18, 19, 20 or 21 nucleotides) having nucleotide sequence complementarity to sequence X or a portion thereof, p comprises a terminal phosphate group that can be present or absent, and wherein X comprises nucleotide sequence that is complementary to a HCV target nucleic acid sequence or a portion thereof (e.g., HCV RNA target) and is of length sufficient to interact (e.g., base pair) with the HCV target nucleic acid sequence (e.g., HCV target RNA) or a portion thereof. In one embodiment, the lengths of oligonucleotides X and X′ are identical. In another embodiment, the lengths of oligonucleotides X and X′ are not identical. In one embodiment, the lengths of the oligonucleotides X and X′ are sufficint to form a relatively stable double stranded oligonucleotide. In one embodiment, the double stranded oligonucleotide construct of Formula II(a) includes one or more, specifically 1, 2, 3 or 4, mismatches, to the extent such mismatches do not significantly diminish the ability of the double stranded oligonucleotide to inhibit HCV target gene expression.

[0436] In one embodiment, the invention features a DFO molecule having Formula DFO-I(b):

5′-p-Z-3′

where Z comprises a palindromic or repeat nucleic acid sequence optionally including one or more non-standard or modified nucleotides (e.g., nucleotide with a modified base, such as 2-amino purine or a universal base) that can facilitate base-pairing with other nucleotides. Z can be, for example, of length sufficient to interact (e.g., base pair) with nucleotide sequence of a HCV target nucleic acid (e.g., HCV target RNA) molecule, preferably of length of at least 12 nucleotides, specifically about 12 to about 24 nucleotides (e.g., about 12, 14, 16, 18, 20, 22 or 24 nucleotides). p represents a terminal phosphate group that can be present or absent.

[0437] In one embodiment, a DFO molecule having any of Formula DFO-I, DFO-I(a), DFO-I(b), DFO-II(a) or DFO-II can comprise chemical modifications as described herein without limitation, such as, for example, nucleotides having any of Formulae I-VII, stabilization chemistries as described in Table IV, or any other combination of modified nucleotides and non-nucleotides as described in the various embodiments herein.

[0438] In one embodiment, the palidrome or repeat sequence or modified nucleotide (e.g., nucleotide with a modified base, such as 2-amino purine or a universal base) in Z of DFO constructs having Formula DFO-I, DFO-I(a) and DFO-I(b), comprises chemically modified nucleotides that are able to interact with a portion of the HCV target nucleic acid sequence (e.g., modified base analogs that can form Watson Crick base pairs or non-Watson Crick base pairs).

[0439] In one embodiment, a DFO molecule of the invention, for example a DFO having Formula DFO-I or DFO-II, comprises about 15 to about 40 nucleotides (e.g., about 15, 16, 17, 18, 19, 20, 21, 22, 23, 24, 25, 26, 27, 28, 29, 30, 31, 32, 33, 34, 35, 36, 37, 38, 39, or 40 nucleotides). In one embodiment, a DFO molecule of the invention comprises one or more chemical modifications. In a non-limiting example, the introduction of chemically modified nucleotides and/or non-nucleotides into nucleic acid molecules of the invention provides a powerful tool in overcoming potential limitations of in vivo stability and bioavailability inherent to unmodified RNA molecules that are delivered exogenously. For example, the use of chemically modified nucleic acid molecules can enable a lower dose of a particular nucleic acid molecule for a given therapeutic effect since chemically modified nucleic acid molecules tend to have a longer half-life in serum or in cells or tissues. Furthermore, certain chemical modifications can improve the bioavailability and/or potency of nucleic acid molecules by not only enhancing half-life but also facilitating the targeting of nucleic acid molecules to particular organs, cells or tissues and/or improving cellular uptake of the nucleic acid molecules. Therefore, even if the activity of a chemically modified nucleic acid molecule is reduced in vitro as compared to a native/unmodified nucleic acid molecule, for example when compared to an unmodified RNA molecule, the overall activity of the modified nucleic acid molecule can be greater than the native or unmodified nucleic acid molecule due to improved stability, potency, duration of effect, bioavailability and/or delivery of the molecule.

Multifunctional or Multi-Targeted siNA Molecules of the Invention

[0440] In one embodiment, the invention features siNA molecules comprising multifunctional short interfering nucleic acid (multifunctional siNA) molecules that modulate the expression of one or more genes in a biologic system, such as a cell, tissue, or organism. The multifunctional short interfering nucleic acid (multifunctional siNA) molecules of the invention can target more than one region of the HCV or cellular/host target nucleic acid sequence or can target sequences of more than one distinct target nucleic acid molecules (e.g., HCV RNA or cellular/host RNA targets). The multifunctional siNA molecules of the invention can be chemically synthesized or expressed from transcription units and/or vectors. The multifunctional siNA molecules of the instant invention provide useful reagents and methods for a variety of human applications, therapeutic, diagnostic, agricultural, veterinary, target validation, genomic discovery, genetic engineering and pharmacogenomic applications.

[0441] Applicant demonstrates herein that certain oligonucleotides, refered to herein for convenience but not limitation as multifunctional short interfering nucleic acid or multifunctional siNA molecules, are potent mediators of sequence specific regulation of gene expression. The multifunctional siNA molecules of the invention are distinct from other nucleic acid sequences known in the art (e.g., siRNA, miRNA, stRNA, shRNA, antisense oligonucleotides, etc.) in that they represent a class of polynucleotide molecules that are designed such that each strand in the multifunctional siNA construct comprises a nucleotide sequence that is complementary to a distinct nucleic acid sequence in one or more target nucleic acid molecules. A single multifunctional siNA molecule (generally a double-stranded molecule) of the invention can thus target more than one (e.g., 2, 3, 4, 5, or more) differing target nucleic acid target molecules. Nucleic acid molecules of the invention can also target more than one (e.g., 2, 3, 4, 5, or more) region of the same target nucleic acid sequence. As such multifunctional siNA molecules of the invention are useful in down regulating or inhibiting the expression of one or more target nucleic acid molecules. For example, a multifunctional siNA molecule of the invention can target nucleic acid molecules encoding a virus or viral proteins and corresponding cellular proteins required for viral infection and/or replication, or differing strains of a particular virus (e.g., HCV). By reducing or inhibiting expression of more than one target nucleic acid molecule with one multifunctional siNA construct, multifunctional siNA molecules of the invention represent a class of potent therapeutic agents that can provide simultaneous inhibition of multiple targets within a disease or pathogen related pathway. Such simultaneous inhibition can provide synergistic therapeutic treatment strategies without the need for separate preclinical and clinical development efforts or complex regulatory approval process.

[0442] Use of multifunctional siNA molecules that target more then one region of a target nucleic acid molecule (e.g., messenger RNA or HCV RNA) is expected to provide potent inhibition of gene expression. For example, a single multifunctional siNA construct of the invention can target both conserved and variable regions of a target nucleic acid molecule (e.g., HCV RNA), thereby allowing down regulation or inhibition of different strain variants or a virus, or splice variants encoded by a single host gene, or allowing for targeting of both coding and non-coding regions of the host target nucleic acid molecule.

[0443] Generally, double stranded oligonucleotides are formed by the assembly of two distinct oligonucleotides where the oligonucleotide sequence of one strand is complementary to the oligonucleotide sequence of the second strand; such double stranded oligonucleotides are generally assembled from two separate oligonucleotides (e.g., siRNA). Alternately, a duplex can be formed from a single molecule that folds on itself (e.g., shRNA or short hairpin RNA). These double stranded oligonucleotides are known in the art to mediate RNA interference and all have a common feature wherein only one nucleotide sequence region (guide sequence or the antisense sequence) has complementarity to a target nucleic acid sequence, and the other strand (sense sequence) comprises nucleotide sequence that is homologous to the target nucleic acid sequence. Generally, the antisense sequence is retained in the active RISC complex and guides the RISC to the target nucleotide sequence by means of complementary base-pairing of the antisense sequence with the target sequence for mediating sequence-specific RNA interference. It is known in the art that in some cell culture systems, certain types of unmodified siRNAs can exhibit “off target” effects. It is hypothesized that this off-target effect involves the participation of the sense sequence instead of the antisense sequence of the siRNA in the RISC complex (see for example Schwarz et al., 2003, Cell, 115, 199-208). In this instance the sense sequence is believed to direct the RISC complex to a sequence (off-target sequence) that is distinct from the intended target sequence, resulting in the inhibition of the off-target sequence. In these double stranded nucleic acid molecules, each strand is complementary to a distinct target nucleic acid sequence. However, the off-targets that are affected by these dsRNAs are not entirely predictable and are non-specific.

[0444] Distinct from the double stranded nucleic acid molecules known in the art, the applicants have developed a novel, potentially cost effective and simplified method of down regulating or inhibiting the expression of more than one target nucleic acid sequence using a single multifunctional siNA construct. The multifunctional siNA molecules of the invention are designed to be double-stranded or partially double stranded, such that a portion of each strand or region of the multifunctional siNA is complementary to a target nucleic acid sequence of choice. As such, the multifunctional siNA molecules of the invention are not limited to targeting sequences that are complementary to each other, but rather to any two differing target nucleic acid sequences. Multifunctional siNA molecules of the invention are designed such that each strand or region of the multifunctional siNA molecule, that is complementary to a given target nucleic acid sequence, is of suitable length (e.g., from about 16 to about 28 nucleotides in length, preferably from about 18 to about 28 nucleotides in length) for mediating RNA interference against the target nucleic acid sequence. The complementarity between the target nucleic acid sequence and a strand or region of the multifunctional siNA must be sufficient (at least about 8 base pairs) for cleavage of the target nucleic acid sequence by RNA interference. multifunctional siNA of the invention is expected to minimize off-target effects seen with certain siRNA sequences, such as those described in (Schwarz et al., supra).

[0445] It has been reported that dsRNAs of length between 29 base pairs and 36 base pairs (Tuschl et al., International PCT Publication No. WO 02/44321) do not mediate RNAi. One reason these dsRNAs are inactive may be the lack of turnover or dissociation of the strand that interacts with the target RNA sequence, such that the RISC complex is not able to efficiently interact with multiple copies of the target RNA resulting in a significant decrease in the potency and efficiency of the RNAi process. Applicant has surprisingly found that the multifunctional siNAs of the invention can overcome this hurdle and are capable of enhancing the efficiency and potency of RNAi process. As such, in certain embodiments of the invention, multifunctional siNAs of length of about 29 to about 36 base pairs can be designed such that, a portion of each strand of the multifunctional siNA molecule comprises a nucleotide sequence region that is complementary to a target nucleic acid of length sufficient to mediate RNAi efficiently (e.g., about 15 to about 23 base pairs) and a nucleotide sequence region that is not complementary to the target nucleic acid. By having both complementary and non-complementary portions in each strand of the multifunctional siNA, the multifunctional siNA can mediate RNA interference against a target nucleic acid sequence without being prohibitive to turnover or dissociation (e.g., where the length of each strand is too long to mediate RNAi against the respective target nucleic acid sequence). Furthermore, design of multifunctional siNA molecules of the invention with internal overlapping regions allows the multifunctional siNA molecules to be of favorable (decreased) size for mediating RNA interference and of size that is well suited for use as a therapeutic agent (e.g., wherein each strand is independently from about 18 to about 28 nucleotides in length). Non-limiting examples are illustrated in FIGS. 16-28.

[0446] In one embodiment, a multifunctional siNA molecule of the invention comprises a first region and a second region, where the first region of the multifunctional siNA comprises a nucleotide sequence complementary to a nucleic acid sequence of a first target nucleic acid molecule, and the second region of the multifunctional siNA comprises nucleic acid sequence complementary to a nucleic acid sequence of a second target nucleic acid molecule. In one embodiment, a multifunctional siNA molecule of the invention comprises a first region and a second region, where the first region of the multifunctional siNA comprises nucleotide sequence complementary to a nucleic acid sequence of the first region of a target nucleic acid molecule, and the second region of the multifunctional siNA comprises nucleotide sequence complementary to a nucleic acid sequence of a second region of a the target nucleic acid molecule. In another embodiment, the first region and second region of the multifunctional siNA can comprise separate nucleic acid sequences that share some degree of complementarity (e.g., from about 1 to about 10 complementary nucleotides). In certain embodiments, multifunctional siNA constructs comprising separate nucleic acid seqeunces can be readily linked post-synthetically by methods and reagents known in the art and such linked constructs are within the scope of the invention. Alternately, the first region and second region of the multifunctional siNA can comprise a single nucleic acid sequence having some degree of self complementarity, such as in a hairpin or stem-loop structure. Non-limiting examples of such double stranded and hairpin multifunctional short interfering nucleic acids are illustrated in FIGS. 16 and 17 respectively. These multifunctional short interfering nucleic acids (multifunctional siNAs) can optionally include certain overlapping nucleotide sequence where such overlapping nucleotide sequence is present in between the first region and the second region of the multifunctional siNA (see for example FIGS. 18 and 19).

[0447] In one embodiment, the invention features a multifunctional short interfering nucleic acid (multifunctional siNA) molecule, wherein each strand of the the multifunctional siNA independently comprises a first region of nucleic acid sequence that is complementary to a distinct target nucleic acid sequence and the second region of nucleotide sequence that is not complementary to the target sequence. The target nucleic acid sequence of each strand is in the same target nucleic acid molecule or different target nucleic acid molecules.

[0448] In another embodiment, the multifunctional siNA comprises two strands, where: (a) the first strand comprises a region having sequence complementarity to a target nucleic acid sequence (complementary region 1) and a region having no sequence complementarity to the target nucleotide sequence (non-complementary region 1); (b) the second strand of the multifunction siNA comprises a region having sequence complementarity to a target nucleic acid sequence that is distinct from the target nucleotide sequence complementary to the first strand nucleotide sequence (complementary region 2), and a region having no sequence complementarity to the target nucleotide sequence of complementary region 2 (non-complementary region 2); (c) the complementary region 1 of the first strand comprises a nucleotide sequence that is complementary to a nucleotide sequence in the non-complementary region 2 of the second strand and the complementary region 2 of the second strand comprises a nucleotide sequence that is complementary to a nucleotide sequence in the non-complementary region 1 of the first strand. The target nucleic acid sequence of complementary region 1 and complementary region 2 is in the same target nucleic acid molecule or different target nucleic acid molecules.

[0449] In another embodiment, the multifunctional siNA comprises two strands, where: (a) the first strand comprises a region having sequence complementarity to a target nucleic acid sequence derived from a gene (e.g., HCV or host gene) (complementary region 1) and a region having no sequence complementarity to the target nucleotide sequence of complementary region 1 (non-complementary region 1); (b) the second strand of the multifunction siNA comprises a region having sequence complementarity to a target nucleic acid sequence derived from a gene that is distinct from the gene of complementary region 1 (complementary region 2), and a region having no sequence complementarity to the target nucleotide sequence of complementary region 2 (non-complementary region 2); (c) the complementary region 1 of the first strand comprises a nucleotide sequence that is complementary to a nucleotide sequence in the non-complementary region 2 of the second strand and the complementary region 2 of the second strand comprises a nucleotide sequence that is complementary to a nucleotide sequence in the non-complementary region 1 of the first strand.

[0450] In another embodiment, the multifunctional siNA comprises two strands, where: (a) the first strand comprises a region having sequence complementarity to a target nucleic acid sequence derived from a gene (e.g., HCV or host gene) (complementary region 1) and a region having no sequence complementarity to the target nucleotide sequence of complementary region 1 (non-complementary region 1); (b) the second strand of the multifunction siNA comprises a region having sequence complementarity to a target nucleic acid sequence distinct from the target nucleic acid sequence of complementary region 1 (complementary region 2), provided, however, that the target nucleic acid sequence for complementary region 1 and target nucleic acid sequence for complementary region 2 are both derived from the same gene, and a region having no sequence complementarity to the target nucleotide sequence of complementary region 2 (non-complementary region 2); (c) the complementary region 1 of the first strand comprises a nucleotide sequence that is complementary to a nucleotide sequence in the non-complementary region 2 of the second strand and the complementary region 2 of the second strand comprises a nucleotide sequence that is complementary to nucleotide sequence in the non-complementary region 1 of the first strand.

[0451] In one embodiment, the invention features a multifunctional short interfering nucleic acid (multifunctional siNA) molecule, wherein the multifunctional siNA comprises two complementary nucleic acid sequences in which the first sequence comprises a first region having nucleotide sequence complementary to nucleotide sequence within a first target nucleic acid molecule, and in which the second seqeunce comprises a first region having nucleotide sequence complementary to a distinct nucleotide sequence within the same target nucleic acid molecule. Preferably, the first region of the first sequence is also complementary to the nucleotide sequence of the second region of the second sequence, and where the first region of the second sequence is complementary to the nucleotide sequence of the second region of the first sequence.

[0452] In one embodiment, the invention features a multifunctional short interfering nucleic acid (multifunctional siNA) molecule, wherein the multifunctional siNA comprises two complementary nucleic acid sequences in which the first sequence comprises a first region having a nucleotide sequence complementary to a nucleotide sequence within a first target nucleic acid molecule, and in which the second seqeunce comprises a first region having a nucleotide sequence complementary to a distinct nucleotide sequence within a second target nucleic acid molecule. Preferably, the first region of the first sequence is also complementary to the nucleotide sequence of the second region of the second sequence, and where the first region of the second sequence is complementary to the nucleotide sequence of the second region of the first sequence.

[0453] In one embodiment, the invention features a multifunctional siNA molecule comprising a first region and a second region, where the first region comprises a nucleic acid sequence having about 18 to about 28 nucleotides complementary to a nucleic acid sequence within a first target nucleic acid molecule, and the second region comprises nucleotide sequence having about 18 to about 28 nucleotides complementary to a distinct nucleic acid sequence within a second target nucleic acid molecule.

[0454] In one embodiment, the invention features a multifunctional siNA molecule comprising a first region and a second region, where the first region comprises nucleic acid sequence having about 18 to about 28 nucleotides complementary to a nucleic acid sequence within a target nucleic acid molecule, and the second region comprises nucleotide sequence having about 18 to about 28 nucleotides complementary to a distinct nucleic acid sequence within the same target nucleic acid molecule.

[0455] In one embodiment, the invention features a double stranded multifunctional short interfering nucleic acid (multifunctional siNA) molecule, wherein one strand of the multifunctional siNA comprises a first region having nucleotide sequence complementary to a first target nucleic acid sequence, and the second strand comprises a first region having a nucleotide sequence complementary to a second target nucleic acid sequence. The first and second target nucleic acid sequences can be present in separate target nucleic acid molecules or can be different regions within the same target nucleic acid molecule. As such, multifunctional siNA molecules of the invention can be used to target the expression of different genes, splice variants of the same gene, both mutant and conserved regions of one or more gene transcripts, or both coding and non-coding sequences of the same or differeing genes or gene transcripts.

[0456] In one embodiment, a target nucleic acid molecule of the invention encodes a single protein. In another embodiment, a target nucleic acid molecule encodes more than one protein (e.g., 1, 2, 3, 4, 5 or more proteins). As such, a multifunctional siNA construct of the invention can be used to down regulate or inhibit the expression of several proteins. For example, a multifunctional siNA molecule comprising a region in one strand having nucleotide sequence complementarity to a first target nucleic acid sequence derived from a viral genome (e.g., HCV) and the second strand comprising a region with nucleotide sequence complementarity to a second target nucleic acid sequence present in target nucleic acid molecules derived from genes encoding two proteins (e.g., two differing host proteins involved in the HCV life-cycle) can be used to down regulate, inhibit, or shut down a particular biologic pathway by targeting, for example, a viral RNA (e.g., HCV RNA) and one or more host RNAs that are involved in viral infection or the viral life-cycle (e.g., La antigen or interferon regulatory factors).

[0457] In another non-limiting example, a multifunctional siNA molecule comprising a region in one strand having a nucleotide sequence complementarity to a first target nucleic acid sequence derived from a target nucleic acid molecule encoding a virus or a viral protein (e.g., HIV) and the second strand comprising a region having a nucleotide sequence complementarity to a second target nucleic acid sequence present in target nucleic acid molecule encoding a cellular protein (e.g., a receptor for the virus, such as CCR5 receptor for HIV) can be used to down regulate, inhibit, or shut down the viral replication and infection by targeting the virus and cellular proteins necessary for viral infection or replication.

[0458] In another nonlimiting example, a multifunctional siNA molecule comprising a region in one strand having a nucleotide sequence complementarity to a first target nucleic acid sequence (e.g., conserved sequence) present in a target nucleic acid molecule such as a viral genome (e.g., HCV RNA) and the second strand comprising a region having a nucleotide sequence complementarity to a second target nucleic acid sequence (e.g., conserved sequence) present in target nucleic acid molecule derived from a gene encoding a viral protein (e.g., HCV proteins) to down regulate, inhibit, or shut down the viral replication and infection by targeting the viral genome and viral encoded proteins necessary for viral infection or replication.

[0459] In one embodiment the invention takes advantage of conserved nucleotide sequences present in different strains, isotypes or forms of a virus and genes encoded by these different strains, isotypes and forms of the virus (e.g., HCV). By designing multifunctional siNAs in a manner where one strand includes a sequence that is complementary to target nucleic acid sequence conserved among various strains, isotypes or forms of a virus and the other strand includes sequence that is complementary to target nucleic acid sequence conserved in a protein encoded by the virus, it is possible to selectively and effectively inhibit viral replication or infection using a single multifunctional siNA.

[0460] In one embodiment, a multifunctional short interfering nucleic acid (multifunctional siNA) of the invention comprises a first region and a second region, wherein the first region comprises nucleotide sequence complementary to a HCV viral RNA of a first viral strain and the second region comprises nucleotide sequence complementary to a HCV viral RNA of a second viral strain. In one embodiment, the first and second regions can comprise nucleotide sequence complementary to shared or conserved RNA sequences of differing viral strains or classes or viral strains.

[0461] In one embodiment, a multifunctional short interfering nucleic acid (multifunctional siNA) of the invention comprises a first region and a second region, wherein the first region comprises a nucleotide sequence complementary to a HCV viral RNA encoding one or more HCV viruses (e.g., one or more strains of HCV) and the second region comprises a nucleotide sequence complementary to a viral RNA encoding one or more interferon agonist proteins. In one embodiment, the first region can comprise a nucleotide sequence complementary to shared or conserved RNA sequences of differing HCV viral strains or classes of HCV viral strains. Non-limiting example of interferon agonist proteins include any protein that is capable of inhibition or suppressing RNA silencing (e.g., RNA binding proteins such as E3L or NS1 or equivalents thereof, see for example Li et al., 2004, PNAS, 101, 1350-1355).

[0462] In one embodiment, a multifunctional short interfering nucleic acid (multifunctional siNA) of the invention comprises a first region and a second region, wherein the first region comprises nucleotide sequence complementary to a HCV viral RNA and the second region comprises nucleotide sequence complementary to a cellular RNA that is involved in HCV viral infection and/or replication. Non-limiting examples of cellular RNAs involved in viral infection and/or replication include cellular receptors, cell surface molecules, cellular enzymes, cellular transcription factors, and/or cytokines, second messengers, and cellular accessory molecules including, but not limited to, La antigen, FAS, interferon agonsit proteins (e.g., E3L or NS1 or equivalents thereof, see for example Li et al., 2004, PNAS, 101, 1350-1355), interferon regulatory factors (IRFs); cellular PKR protein kinase (PKR); human eukaryotic initiation factors 2B (elF2B gamma and/or elF2gamma); human DEAD Box protein (DDX3); and cellular proteins that bind to the poly(U) tract of the HCV 3′-UTR, such as polypyrimidine tract-binding protein.

[0463] In one embodiment, a double stranded multifunctional siNA molecule of the invention comprises a structure having Formula MF-I:

5′-p-X Z X′-3′
3′-Y′ Z Y-p-5′

wherein each 5′-p-XZX′-3′ and 5′-p-YZY′-3′ are independently an oligonucleotide of length about 20 nucleotides to about 300 nucleotides, preferably about 20 to about 200 nucleotides, about 20 to about 100 nucleotides, about 20 to about 40 nucleotides, about 20 to about 40 nucleotides, about 24 to about 38 nucleotides, or about 26 to about 38 nucleotides; XZ comprises a nucleic acid sequence that is complementary to a first HCV target nucleic acid sequence; YZ is an oligonucleotide comprising nucleic acid sequence that is complementary to a second HCV target nucleic acid sequence; Z comprises nucleotide sequence of length about 1 to about 24 nucleotides (e.g., about 1, 2, 3, 4, 5, 6, 7, 8, 9, 10, 11, 12, 13, 14, 15, 16, 17, 18, 19, 20, 21, 22, 23, or 24 nucleotides) that is self complementary; X comprises nucleotide sequence of length about 1 to about 100 nucleotides, preferably about 1 to about 21 nucleotides (e.g., about 1, 2, 3, 4, 5, 6, 7, 8, 9, 10, 11, 12, 13, 14, 15, 16, 17, 18, 19, 20, or 21 nucleotides) that is complementary to nucleotide sequence present in region Y′; Y comprises nucleotide sequence of length about 1 to about 100 nucleotides, preferably about 1 to about 21 nucleotides (e.g., about 1, 2, 3, 4, 5, 6, 7, 8, 9, 10, 11, 12, 13, 14, 15, 16, 17, 18, 19, 20 or 21 nucleotides) that is complementary to nucleotide sequence present in region X′; each p comprises a terminal phosphate group that is independently present or absent; each XZ and YZ is independently of length sufficient to stably interact (i.e., base pair) with the first and second target nucleic acid sequence, respectively, or a portion thereof. For example, each sequence X and Y can independently comprise sequence from about 12 to about 21 or more nucleotides in length (e.g., about 12, 13, 14, 15, 16, 17, 18, 19, 20, 21, or more) that is complementary to a target nucleotide sequence in different target nucleic acid molecules, such as target RNAs or a portion thereof. In another non-limiting example, the length of the nucleotide sequence of X and Z together that is complementary to the first HCV target nucleic acid sequence or a portion thereof is from about 12 to about 21 or more nucleotides (e.g., about 12, 13, 14, 15, 16, 17, 18, 19, 20, 21, or more). In another non-limiting example, the length of the nucleotide sequence of Y and Z together, that is complementary to the second HCV target nucleic acid sequence or a portion thereof is from about 12 to about 21 or more nucleotides (e.g., about 12, 13, 14, 15, 16, 17, 18, 19, 20, 21, or more). In one embodiment, the first HCV target nucleic acid sequence and the second HCV target nucleic acid sequence are present in the same target nucleic acid molecule (e.g., HCV RNA or host RNA). In another embodiment, the first HCV target nucleic acid sequence and the second HCV target nucleic acid sequence are present in different target nucleic acid molecules (e.g., HCV RNA and host RNA). In one embodiment, Z comprises a palindrome or a repeat sequence. In one embodiment, the lengths of oligonucleotides X and X′ are identical. In another embodiment, the lengths of oligonucleotides X and X′ are not identical. In one embodiment, the lengths of oligonucleotides Y and Y′ are identical. In another embodiment, the lengths of oligonucleotides Y and Y′ are not identical. In one embodiment, the double stranded oligonucleotide construct of Formula I(a) includes one or more, specifically 1, 2, 3 or 4, mismatches, to the extent such mismatches do not significantly diminish the ability of the double stranded oligonucleotide to inhibit target gene expression.

[0464] In one embodiment, a multifunctional siNA molecule of the invention comprises a structure having Formula MF-II:

5′-p-X X′-3′
3′-Y′ Y-p-5′

wherein each 5′-p-XX′-3′ and 5′-p-YY′-3′ are independently an oligonucleotide of length about 20 nucleotides to about 300 nucleotides, preferably about 20 to about 200 nucleotides, about 20 to about 100 nucleotides, about 20 to about 40 nucleotides, about 20 to about 40 nucleotides, about 24 to about 38 nucleotides, or about 26 to about 38 nucleotides; X comprises a nucleic acid sequence that is complementary to a first target nucleic acid sequence; Y is an oligonucleotide comprising nucleic acid sequence that is complementary to a second target nucleic acid sequence; X comprises a nucleotide sequence of length about 1 to about 100 nucleotides, preferably about 1 to about 21 nucleotides (e.g., about 1, 2, 3, 4, 5, 6, 7, 8, 9, 10, 11, 12, 13, 14, 15, 16, 17, 18, 19, 20, or 21 nucleotides) that is complementary to nucleotide sequence present in region Y′; Y comprises nucleotide sequence of length about 1 to about 100 nucleotides, preferably about 1 to about 21 nucleotides (e.g., about 1, 2, 3, 4, 5, 6, 7, 8, 9, 10, 11, 12, 13, 14, 15, 16, 17, 18, 19, 20 or 21 nucleotides) that is complementary to nucleotide sequence present in region X′; each p comprises a terminal phosphate group that is independently present or absent; each X and Y independently is of length sufficient to stably interact (i.e., base pair) with the first and second target nucleic acid sequence, respectively, or a portion thereof. For example, each sequence X and Y can independently comprise sequence from about 12 to about 21 or more nucleotides in length (e.g., about 12, 13, 14, 15, 16, 17, 18, 19, 20, 21, or more) that is complementary to a target nucleotide sequence in different target nucleic acid molecules, such as HCV target RNAs or a portion thereof. In one embodiment, the first HCV target nucleic acid sequence and the second HCV target nucleic acid sequence are present in the same target nucleic acid molecule (e.g., HCV RNA or host RNA). In another embodiment, the first HCV target nucleic acid sequence and the second HCV target nucleic acid sequence are present in different target nucleic acid molecules (e.g., HCV RNA and host RNA). In one embodiment, Z comprises a palindrome or a repeat sequence. In one embodiment, the lengths of oligonucleotides X and X′ are identical. In another embodiment, the lengths of oligonucleotides X and X′ are not identical. In one embodiment, the lengths of oligonucleotides Y and Y′ are identical. In another embodiment, the lengths of oligonucleotides Y and Y′ are not identical. In one embodiment, the double stranded oligonucleotide construct of Formula I(a) includes one or more, specifically 1, 2, 3 or 4, mismatches, to the extent such mismatches do not significantly diminish the ability of the double stranded oligonucleotide to inhibit target gene expression.

[0465] In one embodiment, a multifunctional siNA molecule of the invention comprises a structure having Formula MF-III:

X X′
Y′-W-Y

wherein each X, X′, Y, and Y′ is independently an oligonucleotide of length about 15 nucleotides to about 50 nucleotides, preferably about 18 to about 40 nucleotides, or about 19 to about 23 nucleotides; X comprises nucleotide sequence that is complementary to nucleotide sequence present in region Y′; X′ comprises nucleotide sequence that is complementary to nucleotide sequence present in region Y; each X and X′ is independently of length sufficient to stably interact (i.e., base pair) with a first and a second HCV target nucleic acid sequence, respectively, or a portion thereof; W represents a nucleotide or non-nucleotide linker that connects sequences Y′ and Y; and the multifunctional siNA directs cleavage of the first and second HCV target sequence via RNA interference. In one embodiment, the first HCV target nucleic acid sequence and the second HCV target nucleic acid sequence are present in the same target nucleic acid molecule (e.g., HCV RNA or host RNA). In another embodiment, the first HCV target nucleic acid sequence and the second HCV target nucleic acid sequence are present in different target nucleic acid molecules (e.g., HCV RNA and host RNA). In one embodiment, region W connects the 3′-end of sequence Y′ with the 3′-end of sequence Y. In one embodiment, region W connects the 3′-end of sequence Y′ with the 5′-end of sequence Y. In one embodiment, region W connects the 5′-end of sequence Y′ with the 5′-end of sequence Y. In one embodiment, region W connects the 5′-end of sequence Y′ with the 3′-end of sequence Y. In one embodiment, a terminal phosphate group is present at the 5′-end of sequence X. In one embodiment, a terminal phosphate group is present at the 5′-end of sequence X′. In one embodiment, a terminal phosphate group is present at the 5′-end of sequence Y. In one embodiment, a terminal phosphate group is present at the 5′-end of sequence Y′. In one embodiment, W connects sequences Y and Y′ via a biodegradable linker. In one embodiment, W further comprises a conjugate, lable, aptamer, ligand, lipid, or polymer.

[0466] In one embodiment, a multifunctional siNA molecule of the invention comprises a structure having Formula MF-IV:

X X′
Y′-W-Y

wherein each X, X′, Y, and Y′ is independently an oligonucleotide of length about 15 nucleotides to about 50 nucleotides, preferably about 18 to about 40 nucleotides, or about 19 to about 23 nucleotides; X comprises nucleotide sequence that is complementary to nucleotide sequence present in region Y′; X′ comprises nucleotide sequence that is complementary to nucleotide sequence present in region Y; each Y and Y′ is independently of length sufficient to stably interact (i.e., base pair) with a first and a second HCV target nucleic acid sequence, respectively, or a portion thereof; W represents a nucleotide or non-nucleotide linker that connects sequences Y′ and Y; and the multifunctional siNA directs cleavage of the first and second HCV target sequence via RNA interference. In one embodiment, the first HCV target nucleic acid sequence and the second HCV target nucleic acid sequence are present in the same target nucleic acid molecule (e.g., HCV RNA or host RNA). In another embodiment, the first HCV target nucleic acid sequence and the second HCV target nucleic acid sequence are present in different target nucleic acid molecules (e.g., HCV RNA and host RNA). In one embodiment, region W connects the 3′-end of sequence Y′ with the 3′-end of sequence Y. In one embodiment, region W connects the 3′-end of sequence Y′ with the 5′-end of sequence Y. In one embodiment, region W connects the 5′-end of sequence Y′ with the 5′-end of sequence Y. In one embodiment, region W connects the 5′-end of sequence Y′ with the 3′-end of sequence Y. In one embodiment, a terminal phosphate group is present at the 5′-end of sequence X. In one embodiment, a terminal phosphate group is present at the 5′-end of sequence X′. In one embodiment, a terminal phosphate group is present at the 5′-end of sequence Y. In one embodiment, a terminal phosphate group is present at the 5′-end of sequence Y′. In one embodiment, W connects sequences Y and Y′ via a biodegradable linker. In one embodiment, W further comprises a conjugate, lable, aptamer, ligand, lipid, or polymer.

[0467] In one embodiment, a multifunctional siNA molecule of the invention comprises a structure having Formula MF-V:

X X′
Y′-W-Y

wherein each X, X′, Y, and Y′ is independently an oligonucleotide of length about 15 nucleotides to about 50 nucleotides, preferably about 18 to about 40 nucleotides, or about 19 to about 23 nucleotides; X comprises nucleotide sequence that is complementary to nucleotide sequence present in region Y′; X′ comprises nucleotide sequence that is complementary to nucleotide sequence present in region Y; each X, X′, Y, or Y′ is independently of length sufficient to stably interact (i.e., base pair) with a first, second, third, or fourth HCV target nucleic acid sequence, respectively, or a portion thereof; W represents a nucleotide or non-nucleotide linker that connects sequences Y′ and Y; and the multifunctional siNA directs cleavage of the first, second, third, and/or fourth target sequence via RNA interference. In one embodiment, the first, second, third and fourth HCV target nucleic acid sequence are all present in the same target nucleic acid molecule (e.g., HCV RNA or host RNA). In another embodiment, the first, second, third and fourth HCV target nucleic acid sequence are independently present in different target nucleic acid molecules (e.g., HCV RNA and host RNA). In one embodiment, region W connects the 3′-end of sequence Y′ with the 3′-end of sequence Y. In one embodiment, region W connects the 3′-end of sequence Y′ with the 5′-end of sequence Y. In one embodiment, region W connects the 5′-end of sequence Y′ with the 5′-end of sequence Y. In one embodiment, region W connects the 5′-end of sequence Y′ with the 3′-end of sequence Y. In one embodiment, a terminal phosphate group is present at the 5′-end of sequence X. In one embodiment, a terminal phosphate group is present at the 5′-end of sequence X′. In one embodiment, a terminal phosphate group is present at the 5′-end of sequence Y. In one embodiment, a terminal phosphate group is present at the 5′-end of sequence Y′. In one embodiment, W connects sequences Y and Y′ via a biodegradable linker. In one embodiment, W further comprises a conjugate, lable, aptamer, ligand, lipid, or polymer.

[0468] In one embodiment, regions X and Y of multifunctional siNA molecule of the invention (e.g., having any of Formula MF-I-MF-V), are complementary to different target nucleic acid sequences that are portions of the same target nucleic acid molecule. In one embodiment, such target nucleic acid sequences are at different locations within the coding region of a RNA transcript. In one embodiment, such target nucleic acid sequences comprise coding and non-coding regions of the same RNA transcript. In one embodiment, such target nucleic acid sequences comprise regions of alternately spliced transcripts or precursors of such alternately spliced transcripts.

[0469] In one embodiment, a multifunctional siNA molecule having any of Formula MF-I-MF-V can comprise chemical modifications as described herein without limitation, such as, for example, nucleotides having any of Formulae I-VII described herein, stabilization chemistries as described in Table IV, or any other combination of modified nucleotides and non-nucleotides as described in the various embodiments herein.

[0470] In one embodiment, the palidrome or repeat sequence or modified nucleotide (e.g., nucleotide with a modified base, such as 2-amino purine or a universal base) in Z of multifunctional siNA constructs having Formula MF-I or MF-II comprises chemically modified nucleotides that are able to interact with a portion of the target nucleic acid sequence (e.g., modified base analogs that can form Watson Crick base pairs or non-Watson Crick base pairs).

[0471] In one embodiment, a multifunctional siNA molecule of the invention, for example each strand of a multifunctional siNA having MF-I-MF-V, independently comprises about 15 to about 40 nucleotides (e.g., about 15, 16, 17, 18, 19, 20, 21, 22, 23, 24, 25, 26, 27, 28, 29, 30, 31, 32, 33, 34, 35, 36, 37, 38, 39, or 40 nucleotides). In one embodiment, a multifunctional siNA molecule of the invention comprises one or more chemical modifications. In a non-limiting example, the introduction of chemically modified nucleotides and/or non-nucleotides into nucleic acid molecules of the invention provides a powerful tool in overcoming potential limitations of in vivo stability and bioavailability inherent to unmodified RNA molecules that are delivered exogenously. For example, the use of chemically modified nucleic acid molecules can enable a lower dose of a particular nucleic acid molecule for a given therapeutic effect since chemically modified nucleic acid molecules tend to have a longer half-life in serum or in cells or tissues. Furthermore, certain chemical modifications can improve the bioavailability and/or potency of nucleic acid molecules by not only enhancing half-life but also facilitating the targeting of nucleic acid molecules to particular organs, cells or tissues and/or improving cellular uptake of the nucleic acid molecules. Therefore, even if the activity of a chemically modified nucleic acid molecule is reduced in vitro as compared to a native/unmodified nucleic acid molecule, for example when compared to an unmodified RNA molecule, the overall activity of the modified nucleic acid molecule can be greater than the native or unmodified nucleic acid molecule due to improved stability, potency, duration of effect, bioavailability and/or delivery of the molecule.

[0472] In another embodiment, the invention features multifunctional siNAs, wherein the multifunctional siNAs are assembled from two separate double-stranded siNAs, with one of the ends of each sense strand is tethered to the end of the sense strand of the other siNA molecule, such that the two antisense siNA strands are annealed to their corresponding sense strand that are tethered to each other at one end (see FIG. 22). The tethers or linkers can be nucleotide-based linkers or non-nucleotide based linkers as generally known in the art and as described herein.

[0473] In one embodiment, the invention features a multifunctional siNA, wherein the multifunctional siNA is assembled from two separate double-stranded siNAs, with the 5′-end of one sense strand of the siNA is tethered to the 5′-end of the sense strand of the other siNA molecule, such that the 5′-ends of the two antisense siNA strands, annealed to their corresponding sense strand that are tethered to each other at one end, point away (in the opposite direction) from each other (see FIG. 22 (A)). The tethers or linkers can be nucleotide-based linkers or non-nucleotide based linkers as generally known in the art and as described herein.

[0474] In one embodiment, the invention features a multifunctional siNA, wherein the multifunctional siNA is assembled from two separate double-stranded siNAs, with the 3′-end of one sense strand of the siNA is tethered to the 3′-end of the sense strand of the other siNA molecule, such that the 5′-ends of the two antisense siNA strands, annealed to their corresponding sense strand that are tethered to each other at one end, face each other (see FIG. 22 (B)). The tethers or linkers can be nucleotide-based linkers or non-nucleotide based linkers as generally known in the art and as described herein.

[0475] In one embodiment, the invention features a multifunctional siNA, wherein the multifunctional siNA is assembled from two separate double-stranded siNAs, with the 5′-end of one sense strand of the siNA is tethered to the 3′-end of the sense strand of the other siNA molecule, such that the 5′-end of the one of the antisense siNA strands annealed to their corresponding sense strand that are tethered to each other at one end, faces the 3′-end of the other antisense strand (see FIG. 22 (C-D)). The tethers or linkers can be nucleotide-based linkers or non-nucleotide based linkers as generally known in the art and as described herein.

[0476] In one embodiment, the invention features a multifunctional siNA, wherein the multifunctional siNA is assembled from two separate double-stranded siNAs, with the 5′-end of one antisense strand of the siNA is tethered to the 3′-end of the antisense strand of the other siNA molecule, such that the 5′-end of the one of the sense siNA strands annealed to their corresponding antisense sense strand that are tethered to each other at one end, faces the 3′-end of the other sense strand (see FIG. 22 (G-H)). In one embodiment, the linkage between the 5′-end of the first antisense strand and the 3′-end of the second antisense strand is designed in such a way as to be readily cleavable (e.g., biodegradable linker) such that the 5′ end of each antisense strand of the multifunctional siNA has a free 5′-end suitable to mediate RNA interefence-based cleavage of the target RNA. The tethers or linkers can be nucleotide-based linkers or non-nucleotide based linkers as generally known in the art and as described herein.

[0477] In one embodiment, the invention features a multifunctional siNA, wherein the multifunctional siNA is assembled from two separate double-stranded siNAs, with the 5′-end of one antisense strand of the siNA is tethered to the 5′-end of the antisense strand of the other siNA molecule, such that the 3′-end of the one of the sense siNA strands annealed to their corresponding antisense sense strand that are tethered to each other at one end, faces the 3′-end of the other sense strand (see FIG. 22 (E)). In one embodiment, the linkage between the 5′-end of the first antisense strand and the 5′-end of the second antisense strand is designed in such a way as to be readily cleavable (e.g., biodegradable linker) such that the 5′ end of each antisense strand of the multifunctional siNA has a free 5′-end suitable to mediate RNA interefence-based cleavage of the target RNA. The tethers or linkers can be nucleotide-based linkers or non-nucleotide based linkers as generally known in the art and as described herein.

[0478] In one embodiment, the invention features a multifunctional siNA, wherein the multifunctional siNA is assembled from two separate double-stranded siNAs, with the 3′-end of one antisense strand of the siNA is tethered to the 3′-end of the antisense strand of the other siNA molecule, such that the 5′-end of the one of the sense siNA strands annealed to their corresponding antisense sense strand that are tethered to each other at one end, faces the 3′-end of the other sense strand (see FIG. 22 (F)). In one embodiment, the linkage between the 5′-end of the first antisense strand and the 5′-end of the second antisense strand is designed in such a way as to be readily cleavable (e.g., biodegradable linker) such that the 5′ end of each antisense strand of the multifunctional siNA has a free 5′-end suitable to mediate RNA interefence-based cleavage of the target RNA. The tethers or linkers can be nucleotide-based linkers or non-nucleotide based linkers as generally known in the art and as described herein.

[0479] In any of the above embodiments, a first target nucleic acid sequence or second target nucleic acid sequence can independently comprise HCV RNA or a portion thereof or a polynucleotide coding or non-coding sequence of cellular or host target that is invoved in HCV infection or replication, or disease processes associated with HCV infection such as such as cellular receptors, cell surface molecules, cellular enzymes, cellular transcription factors, and/or cytokines, second messengers, and cellular accessory molecules including, but not limited to, La antigen (see for example Costa-Mattioli et al., 2004, Mol Cell Biol., 24, 6861-70, e.g., Genbank Accession No. NM_{—}003142); FAS (e.g., Genbank Accession No. NM_{—}000043) or FAS ligand (e.g., Genbank Accession No. NM_{—}000639); interferon regulatory factors (IRFs; e.g., Genbank Accession No. AF082503.1); cellular PKR protein kinase (e.g., Genbank Accession No. XM_{—}002661.7); human eukaryotic initiation factors 2B (elF2Bgamma; e.g., Genbank Accession No. AF256223, and/or elF2gamma; e.g., Genbank Accession No. NM_{—}006874.1); human DEAD Box protein (DDX3; e.g., Genbank Accession No. XM_{—}018021.2); and cellular proteins that bind to the poly(U) tract of the HCV 3′-UTR, such as polypyrimidine tract-binding protein (e.g., Genbank Accession Nos. NM_{—}031991.1 and XM_{—}042972.3). In one embodiment, the first HCV target nucleic acid sequence is a HCV RNA or a portion thereof and the second HCV target nucleic acid sequence is a HCV RNA of a portion thereof. In one embodiment, the first HCV target nucleic acid sequence is a HCV RNA or a portion thereof and the second HCV target nucleic acid sequence is a host RNA or a portion thereof. In one embodiment, the first HCV target nucleic acid sequence is a host RNA or a portion thereof and the second HCV target nucleic acid sequence is a host RNA or a portion thereof. In one embodiment, the first HCV target nucleic acid sequence is a host RNA or a portion thereof and the second HCV target nucleic acid sequence is a HCV RNA or a portion thereof.

Synthesis of Nucleic Acid Molecules

[0480] Synthesis of nucleic acids greater than 100 nucleotides in length is difficult using automated methods, and the therapeutic cost of such molecules is prohibitive. In this invention, small nucleic acid motifs (“small” refers to nucleic acid motifs no more than 100 nucleotides in length, preferably no more than 80 nucleotides in length, and most preferably no more than 50 nucleotides in length; e.g., individual siNA oligonucleotide sequences or siNA sequences synthesized in tandem) are preferably used for exogenous delivery. The simple structure of these molecules increases the ability of the nucleic acid to invade targeted regions of protein and/or RNA structure. Exemplary molecules of the instant invention are chemically synthesized, and others can similarly be synthesized.

[0481] Oligonucleotides (e.g., certain modified oligonucleotides or portions of oligonucleotides lacking ribonucleotides) are synthesized using protocols known in the art, for example as described in Caruthers et al., 1992, Methods in Enzymology 211, 3-19, Thompson et al., International PCT Publication No. WO 99/54459, Wincott et al., 1995, Nucleic Acids Res. 23, 2677-2684, Wincott et al., 1997, Methods Mol. Bio., 74, 59, Brennan et al., 1998, Biotechnol Bioeng., 61, 33-45, and Brennan, U.S. Pat. No. 6,001,311. All of these references are incorporated herein by reference. The synthesis of oligonucleotides makes use of common nucleic acid protecting and coupling groups, such as dimethoxytrityl at the 5′-end, and phosphoramidites at the 3′-end. In a non-limiting example, small scale syntheses are conducted on a 394 Applied Biosystems, Inc. synthesizer using a 0.2 μmol scale protocol with a 2.5 min coupling step for 2′-O-methylated nucleotides and a 45 second coupling step for 2′-deoxy nucleotides or 2′-deoxy-2′-fluoro nucleotides. Table V outlines the amounts and the contact times of the reagents used in the synthesis cycle. Alternatively, syntheses at the 0.2 μmol scale can be performed on a 96-well plate synthesizer, such as the instrument produced by Protogene (Palo Alto, Calif.) with minimal modification to the cycle. A 33-fold excess (60 μL of 0.11 M=6.6 μmol) of 2′-O-methyl phosphoramidite and a 105-fold excess of S-ethyl tetrazole (60 μL of 0.25 M=15 μmol) can be used in each coupling cycle of 2′-O-methyl residues relative to polymer-bound 5′-hydroxyl. A 22-fold excess (40 μL of 0.11 M=4.4 μmol) of deoxy phosphoramidite and a 70-fold excess of S-ethyl tetrazole (40 μL of 0.25 M=10 μmol) can be used in each coupling cycle of deoxy residues relative to polymer-bound 5′-hydroxyl. Average coupling yields on the 394 Applied Biosystems, Inc. synthesizer, determined by colorimetric quantitation of the trityl fractions, are typically 97.5-99%. Other oligonucleotide synthesis reagents for the 394 Applied Biosystems, Inc. synthesizer include the following: detritylation solution is 3% TCA in methylene chloride (ABI); capping is performed with 16% N-methyl imidazole in THF (ABI) and 10% acetic anhydride/10% 2,6-lutidine in THF (ABI); and oxidation solution is 16.9 mM I₂, 49 mM pyridine, 9% water in THF (PerSeptive Biosystems, Inc.). Burdick & Jackson Synthesis Grade acetonitrile is used directly from the reagent bottle. S-Ethyltetrazole solution (0.25 M in acetonitrile) is made up from the solid obtained from American International Chemical, Inc. Alternately, for the introduction of phosphorothioate linkages, Beaucage reagent (3H-1,2-Benzodithiol-3-one 1,1-dioxide, 0.05 M in acetonitrile) is used.

[0482] Deprotection of the DNA-based oligonucleotides is performed as follows: the polymer-bound trityl-on oligoribonucleotide is transferred to a 4 mL glass screw top vial and suspended in a solution of 40% aqueous methylamine (1 mL) at 65° C. for 10 minutes. After cooling to −20° C., the supernatant is removed from the polymer support. The support is washed three times with 1.0 mL of EtOH:MeCN:H2O/3:1:1, vortexed and the supernatant is then added to the first supernatant. The combined supernatants, containing the oligoribonucleotide, are dried to a white powder.

[0483] The method of synthesis used for RNA including certain siNA molecules of the invention follows the procedure as described in Usman et al., 1987, J. Am. Chem. Soc., 109, 7845; Scaringe et al., 1990, Nucleic Acids Res., 18, 5433; and Wincott et al., 1995, Nucleic Acids Res. 23, 2677-2684 Wincott et al., 1997, Methods Mol. Bio., 74, 59, and makes use of common nucleic acid protecting and coupling groups, such as dimethoxytrityl at the 5′-end, and phosphoramidites at the 3′-end. In a non-limiting example, small scale syntheses are conducted on a 394 Applied Biosystems, Inc. synthesizer using a 0.2 μmol scale protocol with a 7.5 min coupling step for alkylsilyl protected nucleotides and a 2.5 min coupling step for 2′-O-methylated nucleotides. Table V outlines the amounts and the contact times of the reagents used in the synthesis cycle. Alternatively, syntheses at the 0.2 μmol scale can be done on a 96-well plate synthesizer, such as the instrument produced by Protogene (Palo Alto, Calif.) with minimal modification to the cycle. A 33-fold excess (60 μL of 0.11 M=6.6 μmol) of 2′-O-methyl phosphoramidite and a 75-fold excess of S-ethyl tetrazole (60 μL of 0.25 M=15 μmol) can be used in each coupling cycle of 2′-O-methyl residues relative to polymer-bound 5′-hydroxyl. A 66-fold excess (120 μL of 0.11 M=13.2 μmol) of alkylsilyl (ribo) protected phosphoramidite and a 150-fold excess of S-ethyl tetrazole (120 μL of 0.25 M=30 μmol) can be used in each coupling cycle of ribo residues relative to polymer-bound 5′-hydroxyl. Average coupling yields on the 394 Applied Biosystems, Inc. synthesizer, determined by colorimetric quantitation of the trityl fractions, are typically 97.5-99%. Other oligonucleotide synthesis reagents for the 394 Applied Biosystems, Inc. synthesizer include the following: detritylation solution is 3% TCA in methylene chloride (ABI); capping is performed with 16% N-methyl imidazole in THF (ABI) and 10% acetic anhydride/10% 2,6-lutidine in THF (ABI); oxidation solution is 16.9 mM I₂, 49 mM pyridine, 9% water in THF (PerSeptive Biosystems, Inc.). Burdick & Jackson Synthesis Grade acetonitrile is used directly from the reagent bottle. S-Ethyltetrazole solution (0.25 M in acetonitrile) is made up from the solid obtained from American International Chemical, Inc. Alternately, for the introduction of phosphorothioate linkages, Beaucage reagent (3H-1,2-Benzodithiol-3-one 1,1-dioxide0.05 M in acetonitrile) is used.

[0484] Deprotection of the RNA is performed using either a two-pot or one-pot protocol. For the two-pot protocol, the polymer-bound trityl-on oligoribonucleotide is transferred to a 4 mL glass screw top vial and suspended in a solution of 40% aq. methylamine (1 mL) at 65° C. for 10 min. After cooling to −20° C., the supernatant is removed from the polymer support. The support is washed three times with 1.0 mL of EtOH:MeCN:H2O/3:1:1, vortexed and the supernatant is then added to the first supernatant. The combined supernatants, containing the oligoribonucleotide, are dried to a white powder. The base deprotected oligoribonucleotide is resuspended in anhydrous TEA/HF/NMP solution (300 μL of a solution of 1.5 mL N-methylpyrrolidinone, 750 μL TEA and 1 mL TEA.3HF to provide a 1.4 M HF concentration) and heated to 65° C. After 1.5 h, the oligomer is quenched with 1.5 M NH₄HCO₃.

[0485] Alternatively, for the one-pot protocol, the polymer-bound trityl-on oligoribonucleotide is transferred to a 4 mL glass screw top vial and suspended in a solution of 33% ethanolic methylamine/DMSO: 1/1 (0.8 mL) at 65° C. for 15 minutes. The vial is brought to room temperature TEA.3HF (0.1 mL) is added and the vial is heated at 65° C. for 15 minutes. The sample is cooled at −20° C. and then quenched with 1.5 M NH₄HCO₃.

[0486] For purification of the trityl-on oligomers, the quenched NH₄HCO₃ solution is loaded onto a C-18 containing cartridge that had been prewashed with acetonitrile followed by 50 mM TEAA. After washing the loaded cartridge with water, the RNA is detritylated with 0.5% TFA for 13 minutes. The cartridge is then washed again with water, salt exchanged with 1 M NaCl and washed with water again. The oligonucleotide is then eluted with 30% acetonitrile.

[0487] The average stepwise coupling yields are typically >98% (Wincott et al., 1995 Nucleic Acids Res. 23, 2677-2684). Those of ordinary skill in the art will recognize that the scale of synthesis can be adapted to be larger or smaller than the example described above including but not limited to 96-well format.

[0488] Alternatively, the nucleic acid molecules of the present invention can be synthesized separately and joined together post-synthetically, for example, by ligation (Moore et al., 1992, Science 256, 9923; Draper et al., International PCT publication No. WO 93/23569; Shabarova et al., 1991, Nucleic Acids Research 19, 4247; Bellon et al., 1997, Nucleosides & Nucleotides, 16, 951; Bellon et al., 1997, Bioconjugate Chem. 8, 204), or by hybridization following synthesis and/or deprotection.

[0489] The siNA molecules of the invention can also be synthesized via a tandem synthesis methodology as described in Example 1 herein, wherein both siNA strands are synthesized as a single contiguous oligonucleotide fragment or strand separated by a cleavable linker which is subsequently cleaved to provide separate siNA fragments or strands that hybridize and permit purification of the siNA duplex. The linker can be a polynucleotide linker or a non-nucleotide linker. The tandem synthesis of siNA as described herein can be readily adapted to both multiwell/multiplate synthesis platforms such as 96 well or similarly larger multi-well platforms. The tandem synthesis of siNA as described herein can also be readily adapted to large scale synthesis platforms employing batch reactors, synthesis columns and the like.

[0490] A siNA molecule can also be assembled from two distinct nucleic acid strands or fragments wherein one fragment includes the sense region and the second fragment includes the antisense region of the RNA molecule.

[0491] The nucleic acid molecules of the present invention can be modified extensively to enhance stability by modification with nuclease resistant groups, for example, 2′-amino, 2′-C-allyl, 2′-fluoro, 2′-O-methyl, 2′-H (for a review see Usman and Cedergren, 1992, TIBS 17, 34; Usman et al., 1994, Nucleic Acids Symp. Ser. 31, 163). siNA constructs can be purified by gel electrophoresis using general methods or can be purified by high pressure liquid chromatography (HPLC; see Wincott et al., supra, the totality of which is hereby incorporated herein by reference) and re-suspended in water.

[0492] In another aspect of the invention, siNA molecules of the invention are expressed from transcription units inserted into DNA or RNA vectors. The recombinant vectors can be DNA plasmids or viral vectors. siNA expressing viral vectors can be constructed based on, but not limited to, adeno-associated virus, retrovirus, adenovirus, or alphavirus. The recombinant vectors capable of expressing the siNA molecules can be delivered as described herein, and persist in target cells. Alternatively, viral vectors can be used that provide for transient expression of siNA molecules.

Optimizing Activity of the Nucleic Acid Molecule of the Invention.

[0493] Chemically synthesizing nucleic acid molecules with modifications (base, sugar and/or phosphate) can prevent their degradation by serum ribonucleases, which can increase their potency (see e.g., Eckstein et al., International Publication No. WO 92/07065; Perrault et al., 1990 Nature 344, 565; Pieken et al., 1991, Science 253, 314; Usman and Cedergren, 1992, Trends in Biochem. Sci. 17, 334; Usman et al., International Publication No. WO 93/15187; and Rossi et al., International Publication No. WO 91/03162; Sproat, U.S. Pat. No. 5,334,711; Gold et al., U.S. Pat. No. 6,300,074; and Burgin et al., supra; all of which are incorporated by reference herein). All of the above references describe various chemical modifications that can be made to the base, phosphate and/or sugar moieties of the nucleic acid molecules described herein. Modifications that enhance their efficacy in cells, and removal of bases from nucleic acid molecules to shorten oligonucleotide synthesis times and reduce chemical requirements are desired.

[0494] There are several examples in the art describing sugar, base and phosphate modifications that can be introduced into nucleic acid molecules with significant enhancement in their nuclease stability and efficacy. For example, oligonucleotides are modified to enhance stability and/or enhance biological activity by modification with nuclease resistant groups, for example, 2′-amino, 2′-C-allyl, 2′-fluoro, 2′-O-methyl, 2′-O-allyl, 2′-H, nucleotide base modifications (for a review see Usman and Cedergren, 1992, TIBS. 17, 34; Usman et al., 1994, Nucleic Acids Symp. Ser. 31, 163; Burgin et al., 1996, Biochemistry, 35, 14090). Sugar modification of nucleic acid molecules have been extensively described in the art (see Eckstein et al., International Publication PCT No. WO 92/07065; Perrault et al. Nature, 1990, 344, 565-568; Pieken et al. Science, 1991, 253, 314-317; Usman and Cedergren, Trends in Biochem. Sci., 1992, 17, 334-339; Usman et al. International Publication PCT No. WO 93/15187; Sproat, U.S. Pat. No. 5,334,711 and Beigelman et al., 1995, J. Biol. Chem., 270, 25702; Beigelman et al., International PCT publication No. WO 97/26270; Beigelman et al., U.S. Pat. No. 5,716,824; Usman et al., U.S. Pat. No. 5,627,053; Woolf et al., International PCT Publication No. WO 98/13526; Thompson et al., U.S. Ser. No. 60/082,404 which was filed on Apr. 20, 1998; Karpeisky et al., 1998, Tetrahedron Lett., 39, 1131; Earnshaw and Gait, 1998, Biopolymers (Nucleic Acid Sciences), 48, 39-55; Verma and Eckstein, 1998, Annu. Rev. Biochem., 67, 99-134; and Burlina et al., 1997, Bioorg. Med. Chem., 5, 1999-2010; all of the references are hereby incorporated in their totality by reference herein). Such publications describe general methods and strategies to determine the location of incorporation of sugar, base and/or phosphate modifications and the like into nucleic acid molecules without modulating catalysis, and are incorporated by reference herein. In view of such teachings, similar modifications can be used as described herein to modify the siNA nucleic acid molecules of the instant invention so long as the ability of siNA to promote RNAi is cells is not significantly inhibited.

[0495] While chemical modification of oligonucleotide internucleotide linkages with phosphorothioate, phosphorodithioate, and/or 5′-methylphosphonate linkages improves stability, excessive modifications can cause some toxicity or decreased activity. Therefore, when designing nucleic acid molecules, the amount of these internucleotide linkages should be minimized. The reduction in the concentration of these linkages should lower toxicity, resulting in increased efficacy and higher specificity of these molecules.

[0496] Short interfering nucleic acid (siNA) molecules having chemical modifications that maintain or enhance activity are provided. Such a nucleic acid is also generally more resistant to nucleases than an unmodified nucleic acid. Accordingly, the in vitro and/or in vivo activity should not be significantly lowered. In cases in which modulation is the goal, therapeutic nucleic acid molecules delivered exogenously should optimally be stable within cells until translation of the target RNA has been modulated long enough to reduce the levels of the undesirable protein. This period of time varies between hours to days depending upon the disease state. Improvements in the chemical synthesis of RNA and DNA (Wincott et al., 1995, Nucleic Acids Res. 23, 2677; Caruthers et al., 1992, Methods in Enzymology 211, 3-19 (incorporated by reference herein)) have expanded the ability to modify nucleic acid molecules by introducing nucleotide modifications to enhance their nuclease stability, as described above.

[0497] In one embodiment, nucleic acid molecules of the invention include one or more (e.g., about 1, 2, 3, 4, 5, 6, 7, 8, 9, 10, or more) G-clamp nucleotides. A G-clamp nucleotide is a modified cytosine analog wherein the modifications confer the ability to hydrogen bond both Watson-Crick and Hoogsteen faces of a complementary guanine within a duplex, see for example Lin and Matteucci, 1998, J. Am. Chem. Soc., 120, 8531-8532. A single G-clamp analog substitution within an oligonucleotide can result in substantially enhanced helical thermal stability and mismatch discrimination when hybridized to complementary oligonucleotides. The inclusion of such nucleotides in nucleic acid molecules of the invention results in both enhanced affinity and specificity to nucleic acid targets, complementary sequences, or template strands. In another embodiment, nucleic acid molecules of the invention include one or more (e.g., about 1, 2, 3, 4, 5, 6, 7, 8, 9, 10, or more) LNA “locked nucleic acid” nucleotides such as a 2′,4′-C methylene bicyclo nucleotide (see for example Wengel et al., International PCT Publication No. WO 00/66604 and WO 99/14226).

[0498] In another embodiment, the invention features conjugates and/or complexes of siNA molecules of the invention. Such conjugates and/or complexes can be used to facilitate delivery of siNA molecules into a biological system, such as a cell. The conjugates and complexes provided by the instant invention can impart therapeutic activity by transferring therapeutic compounds across cellular membranes, altering the pharmacokinetics, and/or modulating the localization of nucleic acid molecules of the invention. The present invention encompasses the design and synthesis of novel conjugates and complexes for the delivery of molecules, including, but not limited to, small molecules, lipids, cholesterol, phospholipids, nucleosides, nucleotides, nucleic acids, antibodies, toxins, negatively charged polymers and other polymers, for example proteins, peptides, hormones, carbohydrates, polyethylene glycols, or polyamines, across cellular membranes. In general, the transporters described are designed to be used either individually or as part of a multi-component system, with or without degradable linkers. These compounds are expected to improve delivery and/or localization of nucleic acid molecules of the invention into a number of cell types originating from different tissues, in the presence or absence of serum (see Sullenger and Cech, U.S. Pat. No. 5,854,038). Conjugates of the molecules described herein can be attached to biologically active molecules via linkers that are biodegradable, such as biodegradable nucleic acid linker molecules.

[0499] The term “biodegradable linker” as used herein, refers to a nucleic acid or non-nucleic acid linker molecule that is designed as a biodegradable linker to connect one molecule to another molecule, for example, a biologically active molecule to a siNA molecule of the invention or the sense and antisense strands of a siNA molecule of the invention. The biodegradable linker is designed such that its stability can be modulated for a particular purpose, such as delivery to a particular tissue or cell type. The stability of a nucleic acid-based biodegradable linker molecule can be modulated by using various chemistries, for example combinations of ribonucleotides, deoxyribonucleotides, and chemically-modified nucleotides, such as 2′-O-methyl, 2′-fluoro, 2′-amino, 2′-O-amino, 2′-C-allyl, 2′-O-allyl, and other 2′-modified or base modified nucleotides. The biodegradable nucleic acid linker molecule can be a dimer, trimer, tetramer or longer nucleic acid molecule, for example, an oligonucleotide of about 2, 3, 4, 5, 6, 7, 8, 9, 10, 11, 12, 13, 14, 15, 16, 17, 18, 19, or 20 nucleotides in length, or can comprise a single nucleotide with a phosphorus-based linkage, for example, a phosphoramidate or phosphodiester linkage. The biodegradable nucleic acid linker molecule can also comprise nucleic acid backbone, nucleic acid sugar, or nucleic acid base modifications.

[0500] The term “biodegradable” as used herein, refers to degradation in a biological system, for example, enzymatic degradation or chemical degradation.

[0501] The term “biologically active molecule” as used herein refers to compounds or molecules that are capable of eliciting or modifying a biological response in a system. Non-limiting examples of biologically active siNA molecules either alone or in combination with other molecules contemplated by the instant invention include therapeutically active molecules such as antibodies, cholesterol, hormones, antivirals, peptides, proteins, chemotherapeutics, small molecules, vitamins, co-factors, nucleosides, nucleotides, oligonucleotides, enzymatic nucleic acids, antisense nucleic acids, triplex forming oligonucleotides, 2,5-A chimeras, siNA, dsRNA, allozymes, aptamers, decoys and analogs thereof. Biologically active molecules of the invention also include molecules capable of modulating the pharmacokinetics and/or pharmacodynamics of other biologically active molecules, for example, lipids and polymers such as polyamines, polyamides, polyethylene glycol and other polyethers.

[0502] The term “phospholipid” as used herein, refers to a hydrophobic molecule comprising at least one phosphorus group. For example, a phospholipid can comprise a phosphorus-containing group and saturated or unsaturated alkyl group, optionally substituted with OH, COOH, oxo, amine, or substituted or unsubstituted aryl groups.

[0503] Therapeutic nucleic acid molecules (e.g., siNA molecules) delivered exogenously optimally are stable within cells until reverse transcription of the RNA has been modulated long enough to reduce the levels of the RNA transcript. The nucleic acid molecules are resistant to nucleases in order to function as effective intracellular therapeutic agents. Improvements in the chemical synthesis of nucleic acid molecules described in the instant invention and in the art have expanded the ability to modify nucleic acid molecules by introducing nucleotide modifications to enhance their nuclease stability as described above.

[0504] In yet another embodiment, siNA molecules having chemical modifications that maintain or enhance enzymatic activity of proteins involved in RNAi are provided. Such nucleic acids are also generally more resistant to nucleases than unmodified nucleic acids. Thus, in vitro and/or in vivo the activity should not be significantly lowered.

[0505] Use of the nucleic acid-based molecules of the invention will lead to better treatments by affording the possibility of combination therapies (e.g., multiple siNA molecules targeted to different genes; nucleic acid molecules coupled with known small molecule modulators; or intermittent treatment with combinations of molecules, including different motifs and/or other chemical or biological molecules). The treatment of subjects with siNA molecules can also include combinations of different types of nucleic acid molecules, such as enzymatic nucleic acid molecules (ribozymes), allozymes, antisense, 2,5-A oligoadenylate, decoys, and aptamers.

[0506] In another aspect a siNA molecule of the invention comprises one or more 5′ and/or a 3′-cap structure, for example, on only the sense siNA strand, the antisense siNA strand, or both siNA strands.

[0507] By “cap structure” is meant chemical modifications, which have been incorporated at either terminus of the oligonucleotide (see, for example, Adamic et al., U.S. Pat. No. 5,998,203, incorporated by reference herein). These terminal modifications protect the nucleic acid molecule from exonuclease degradation, and may help in delivery and/or localization within a cell. The cap may be present at the 5′-terminus (5′-cap) or at the 3′-terminal (3′-cap) or may be present on both termini. In non-limiting examples, the 5′-cap includes, but is not limited to, glyceryl, inverted deoxy abasic residue (moiety); 4′,5′-methylene nucleotide; 1-(beta-D-erythrofuranosyl) nucleotide, 4′-thio nucleotide; carbocyclic nucleotide; 1,5-anhydrohexitol nucleotide; L-nucleotides; alpha-nucleotides; modified base nucleotide; phosphorodithioate linkage; threo-pentofuranosyl nucleotide; acyclic 3′,4′-seco nucleotide; acyclic 3,4-dihydroxybutyl nucleotide; acyclic 3,5-dihydroxypentyl nucleotide, 3′-3′-inverted nucleotide moiety; 3′-3′-inverted abasic moiety; 3′-2′-inverted nucleotide moiety; 3′-2′-inverted abasic moiety; 1,4-butanediol phosphate; 3′-phosphoramidate; hexylphosphate; aminohexyl phosphate; 3′-phosphate; 3′-phosphorothioate; phosphorodithioate; or bridging or non-bridging methylphosphonate moiety. Non-limiting examples of cap moieties are shown in FIG. 10.

[0508] Non-limiting examples of the 3′-cap include, but are not limited to, glyceryl, inverted deoxy abasic residue (moiety), 4′,5′-methylene nucleotide; 1-(beta-D-erythrofuranosyl) nucleotide; 4′-thio nucleotide, carbocyclic nucleotide; 5′-amino-alkyl phosphate; 1,3-diamino-2-propyl phosphate; 3-aminopropyl phosphate; 6-aminohexyl phosphate; 1,2-aminododecyl phosphate; hydroxypropyl phosphate; 1,5-anhydrohexitol nucleotide; L-nucleotide; alpha-nucleotide; modified base nucleotide; phosphorodithioate; threo-pentofuranosyl nucleotide; acyclic 3′,4′-seco nucleotide; 3,4-dihydroxybutyl nucleotide; 3,5-dihydroxypentyl nucleotide, 5′-5′-inverted nucleotide moiety; 5′-5′-inverted abasic moiety; 5′-phosphoramidate; 5′-phosphorothioate; 1,4-butanediol phosphate; 5′-amino; bridging and/or non-bridging 5′-phosphoramidate, phosphorothioate and/or phosphorodithioate, bridging or non bridging methylphosphonate and 5′-mercapto moieties (for more details see Beaucage and Iyer, 1993, Tetrahedron 49, 1925; incorporated by reference herein).

[0509] By the term “non-nucleotide” is meant any group or compound which can be incorporated into a nucleic acid chain in the place of one or more nucleotide units, including either sugar and/or phosphate substitutions, and allows the remaining bases to exhibit their enzymatic activity. The group or compound is abasic in that it does not contain a commonly recognized nucleotide base, such as adenosine, guanine, cytosine, uracil or thymine and therefore lacks a base at the 1′-position.

[0510] An “alkyl” group refers to a saturated aliphatic hydrocarbon, including straight-chain, branched-chain, and cyclic alkyl groups. Preferably, the alkyl group has 1 to 12 carbons. More preferably, it is a lower alkyl of from 1 to 7 carbons, more preferably 1 to 4 carbons. The alkyl group can be substituted or unsubstituted. When substituted the substituted group(s) is preferably, hydroxyl, cyano, alkoxy, ═O, ═S, NO₂ or N(CH₃)₂, amino, or SH. The term also includes alkenyl groups that are unsaturated hydrocarbon groups containing at least one carbon-carbon double bond, including straight-chain, branched-chain, and cyclic groups. Preferably, the alkenyl group has 1 to 12 carbons. More preferably, it is a lower alkenyl of from 1 to 7 carbons, more preferably 1 to 4 carbons. The alkenyl group may be substituted or unsubstituted. When substituted the substituted group(s) is preferably, hydroxyl, cyano, alkoxy, ═O, ═S, NO₂, halogen, N(CH₃)₂, amino, or SH. The term “alkyl” also includes alkynyl groups that have an unsaturated hydrocarbon group containing at least one carbon-carbon triple bond, including straight-chain, branched-chain, and cyclic groups. Preferably, the alkynyl group has 1 to 12 carbons. More preferably, it is a lower alkynyl of from 1 to 7 carbons, more preferably 1 to 4 carbons. The alkynyl group may be substituted or unsubstituted. When substituted the substituted group(s) is preferably, hydroxyl, cyano, alkoxy, ═O, ═S, NO₂ or N(CH₃)₂, amino or SH.

[0511] Such alkyl groups can also include aryl, alkylaryl, carbocyclic aryl, heterocyclic aryl, amide and ester groups. An “aryl” group refers to an aromatic group that has at least one ring having a conjugated pi electron system and includes carbocyclic aryl, heterocyclic aryl and biaryl groups, all of which may be optionally substituted. The preferred substituent(s) of aryl groups are halogen, trihalomethyl, hydroxyl, SH, OH, cyano, alkoxy, alkyl, alkenyl, alkynyl, and amino groups. An “alkylaryl” group refers to an alkyl group (as described above) covalently joined to an aryl group (as described above). Carbocyclic aryl groups are groups wherein the ring atoms on the aromatic ring are all carbon atoms. The carbon atoms are optionally substituted. Heterocyclic aryl groups are groups having from 1 to 3 heteroatoms as ring atoms in the aromatic ring and the remainder of the ring atoms are carbon atoms. Suitable heteroatoms include oxygen, sulfur, and nitrogen, and include furanyl, thienyl, pyridyl, pyrrolyl, N-lower alkyl pyrrolo, pyrimidyl, pyrazinyl, imidazolyl and the like, all optionally substituted. An “amide” refers to an —C(O)—NH—R, where R is either alkyl, aryl, alkylaryl or hydrogen. An “ester” refers to an —C(O)—OR′, where R is either alkyl, aryl, alkylaryl or hydrogen.

[0512] By “nucleotide” as used herein is as recognized in the art to include natural bases (standard), and modified bases well known in the art. Such bases are generally located at the 1′ position of a nucleotide sugar moiety. Nucleotides generally comprise a base, sugar and a phosphate group. The nucleotides can be unmodified or modified at the sugar, phosphate and/or base moiety, (also referred to interchangeably as nucleotide analogs, modified nucleotides, non-natural nucleotides, non-standard nucleotides and other; see, for example, Usman and McSwiggen, supra; Eckstein et al., International PCT Publication No. WO 92/07065; Usman et al., International PCT Publication No. WO 93/15187; Uhlman & Peyman, supra, all are hereby incorporated by reference herein). There are several examples of modified nucleic acid bases known in the art as summarized by Limbach et al., 1994, Nucleic Acids Res. 22, 2183. Some of the non-limiting examples of base modifications that can be introduced into nucleic acid molecules include, inosine, purine, pyridin-4-one, pyridin-2-one, phenyl, pseudouracil, 2,4,6-trimethoxy benzene, 3-methyl uracil, dihydrouridine, naphthyl, aminophenyl, 5-alkylcytidines (e.g., 5-methylcytidine), 5-alkyluridines (e.g., ribothymidine), 5-halouridine (e.g., 5-bromouridine) or 6-azapyrimidines or 6-alkylpyrimidines (e.g. 6-methyluridine), propyne, and others (Burgin et al., 1996, Biochemistry, 35, 14090; Uhlman & Peyman, supra). By “modified bases” in this aspect is meant nucleotide bases other than adenine, guanine, cytosine and uracil at 1′ position or their equivalents.

[0513] In one embodiment, the invention features modified siNA molecules, with phosphate backbone modifications comprising one or more phosphorothioate, phosphorodithioate, methylphosphonate, phosphotriester, morpholino, amidate carbamate, carboxymethyl, acetamidate, polyamide, sulfonate, sulfonamide, sulfamate, formacetal, thioformacetal, and/or alkylsilyl, substitutions. For a review of oligonucleotide backbone modifications, see Hunziker and Leumann, 1995, Nucleic Acid Analogues: Synthesis and Properties, in Modern Synthetic Methods, VCH, 331-417, and Mesmaeker et al., 1994, Novel Backbone Replacements for Oligonucleotides, in Carbohydrate Modifications in Antisense Research, ACS, 24-39.

[0514] By “abasic” is meant sugar moieties lacking a nucleobase or having a hydrogen atom (H) or other other non-nucleobase chemical groups in place of a nucleobase at the 1′ position of the sugar moiety, see for example Adamic et al., U.S. Pat. No. 5,998,203. In one embodiment, an abasic moiety of the invention is a ribose, deoxyribose, or dideoxyribose sugar.

[0515] By “unmodified nucleoside” is meant one of the bases adenine, cytosine, guanine, thymine, or uracil joined to the 1′ carbon of β-D-ribo-furanose.

[0516] By “modified nucleoside” is meant any nucleotide base which contains a modification in the chemical structure of an unmodified nucleotide base, sugar and/or phosphate. Non-limiting examples of modified nucleotides are shown by Formulae I-VII and/or other modifications described herein.

[0517] In connection with 2′-modified nucleotides as described for the present invention, by “amino” is meant 2′-NH₂ or 2′-O—NH₂, which can be modified or unmodified. Such modified groups are described, for example, in Eckstein et al., U.S. Pat. No. 5,672,695 and Matulic-Adamic et al., U.S. Pat. No. 6,248,878, which are both incorporated by reference in their entireties.

[0518] Various modifications to nucleic acid siNA structure can be made to enhance the utility of these molecules. Such modifications will enhance shelf-life, half-life in vitro, stability, and ease of introduction of such oligonucleotides to the target site, e.g., to enhance penetration of cellular membranes, and confer the ability to recognize and bind to targeted cells.

Administration of Nucleic Acid Molecules

[0519] A siNA molecule of the invention can be adapted for use to treat, prevent, inhibit, or reduce HCV infection, liver failure, hepatocellular carcinoma, cirrhosis and/or any other trait, disease or condition that is related to or will respond to the levels of HCV in a cell or tissue, alone or in combination with other therapies. In one embodiment, the siNA molecules of the invention and formulations or compositions thereof are administered to the liver as is generally known in the art (see for example Wen et al., 2004, World J Gastroenterol., 10, 244-9; Murao et al., 2002, Pharm Res., 19, 1808-14; Liu et al., 2003, Gene Ther., 10, 180-7; Hong et al., 2003, J Pharm Pharmacol., 54, 51-8; Herrmann et al., 2004, Arch Virol., 149, 1611-7; and Matsuno et al., 2003, Gene Ther., 10, 1559-66).

[0520] In one embodiment, a siNA composition of the invention can comprise a delivery vehicle, including liposomes, for administration to a subject, carriers and diluents and their salts, and/or can be present in pharmaceutically acceptable formulations. Methods for the delivery of nucleic acid molecules are described in Akhtar et al., 1992, Trends Cell Bio., 2, 139; Delivery Strategies for Antisense Oligonucleotide Therapeutics, ed. Akhtar, 1995, Maurer et al., 1999, Mol. Membr. Biol., 16, 129-140; Hofland and Huang, 1999, Handb. Exp. Pharmacol., 137, 165-192; and Lee et al., 2000, ACS Symp. Ser., 752, 184-192, all of which are incorporated herein by reference. Beigelman et al., U.S. Pat. No. 6,395,713 and Sullivan et al., PCT WO 94/02595 further describe the general methods for delivery of nucleic acid molecules. These protocols can be utilized for the delivery of virtually any nucleic acid molecule. Nucleic acid molecules can be administered to cells by a variety of methods known to those of skill in the art, including, but not restricted to, encapsulation in liposomes, by iontophoresis, or by incorporation into other vehicles, such as biodegradable polymers, hydrogels, cyclodextrins (see for example Gonzalez et al., 1999, Bioconjugate Chem., 10, 1068-1074; Wang et al., International PCT publication Nos. WO 03/47518 and WO 03/46185), poly(lactic-co-glycolic)acid (PLGA) and PLCA microspheres (see for example U.S. Pat. No. 6,447,796 and US Patent Application Publication No. US 2002130430), biodegradable nanocapsules, and bioadhesive microspheres, or by proteinaceous vectors (O'Hare and Normand, International PCT Publication No. WO 00/53722). In another embodiment, the nucleic acid molecules of the invention can also be formulated or complexed with polyethyleneimine and derivatives thereof, such as polyethyleneimine-polyethyleneglycol-N-acetylgalactosamine (PEI-PEG-GAL) or polyethyleneimine-polyethyleneglycol-tri-N-acetylgalactosamine (PEI-PEG-triGAL) derivatives. In one embodiment, the nucleic acid molecules of the invention are formulated as described in United States Patent Application Publication No. 20030077829, incorporated by reference herein in its entirety.

[0521] In one embodiment, a siNA molecule of the invention is formulated as a composition described in U.S. Provisional patent application No. 60/678,531 and in related U.S. Provisional patent application No. 60/703,946, filed Jul. 29, 2005, and U.S. Provisional patent application No. 60/737,024, filed Nov. 15, 2005 (Vargeese et al.), all of which are incorporated by reference herein in their entirety. Such siNA formuations are generally referred to as “lipid nucleic acid particles” (LNP). In one embodiment, a siNA molecule of the invention is formulated with LNP-086 or LNP-061 (see and U.S. Provisional patent application No. 60/737,024 supra).

[0522] In one embodiment, a siNA molecule of the invention is complexed with membrane disruptive agents such as those described in U.S. Patent Application Publication No. 20010007666, incorporated by reference herein in its entirety including the drawings. In another embodiment, the membrane disruptive agent or agents and the siNA molecule are also complexed with a cationic lipid or helper lipid molecule, such as those lipids described in U.S. Pat. No. 6,235,310, incorporated by reference herein in its entirety including the drawings.

[0523] In one embodiment, a siNA molecule of the invention is complexed with delivery systems as described in U.S. Patent Application Publication No. 2003077829 and International PCT Publication Nos. WO 00/03683 and WO 02/087541, all incorporated by reference herein in their entirety including the drawings.

[0524] In one embodiment, the nucleic acid molecules of the invention are administered to skeletal tissues (e.g., bone, cartilage, tendon, ligament) or bone metastatic tumors via atelocollagen complexation or conjugation (see for example Takeshita et al., 2005, PNAS, 102, 12177-12182). Therefore, in one embodiment, the instant invention features one or more dsiNA molecules as a composition complexed with atelocollagen. In another embodiment, the instant invention features one or more siNA molecules conjugated to atelocollagen via a linker as described herein or otherwise known in the art.

[0525] In one embodiment, the nucleic acid molecules of the invention are administered via pulmonary delivery, such as by inhalation of an aerosol or spray dried formulation administered by an inhalation device or nebulizer, providing rapid local uptake of the nucleic acid molecules into relevant pulmonary tissues. Solid particulate compositions containing respirable dry particles of micronized nucleic acid compositions can be prepared by grinding dried or lyophilized nucleic acid compositions, and then passing the micronized composition through, for example, a 400 mesh screen to break up or separate out large agglomerates. A solid particulate composition comprising the nucleic acid compositions of the invention can optionally contain a dispersant which serves to facilitate the formation of an aerosol as well as other therapeutic compounds. A suitable dispersant is lactose, which can be blended with the nucleic acid compound in any suitable ratio, such as a 1 to 1 ratio by weight.

[0526] Aerosols of liquid particles comprising a nucleic acid composition of the invention can be produced by any suitable means, such as with a nebulizer (see for example U.S. Pat. No. 4,501,729). Nebulizers are commercially available devices which transform solutions or suspensions of an active ingredient into a therapeutic aerosol mist either by means of acceleration of a compressed gas, typically air or oxygen, through a narrow venturi orifice or by means of ultrasonic agitation. Suitable formulations for use in nebulizers comprise the active ingredient in a liquid carrier in an amount of up to 40% w/w preferably less than 20% w/w of the formulation. The carrier is typically water or a dilute aqueous alcoholic solution, preferably made isotonic with body fluids by the addition of, for example, sodium chloride or other suitable salts. Optional additives include preservatives if the formulation is not prepared sterile, for example, methyl hydroxybenzoate, anti-oxidants, flavorings, volatile oils, buffering agents and emulsifiers and other formulation surfactants. The aerosols of solid particles comprising the active composition and surfactant can likewise be produced with any solid particulate aerosol generator. Aerosol generators for administering solid particulate therapeutics to a subject produce particles which are respirable, as explained above, and generate a volume of aerosol containing a predetermined metered dose of a therapeutic composition at a rate suitable for human administration.

[0527] In one embodiment, a solid particulate aerosol generator of the invention is an insufflator. Suitable formulations for administration by insufflation include finely comminuted powders which can be delivered by means of an insufflator. In the insufflator, the powder, e.g., a metered dose thereof effective to carry out the treatments described herein, is contained in capsules or cartridges, typically made of gelatin or plastic, which are either pierced or opened in situ and the powder delivered by air drawn through the device upon inhalation or by means of a manually-operated pump. The powder employed in the insufflator consists either solely of the active ingredient or of a powder blend comprising the active ingredient, a suitable powder diluent, such as lactose, and an optional surfactant. The active ingredient typically comprises from 0.1 to 100 w/w of the formulation. A second type of illustrative aerosol generator comprises a metered dose inhaler. Metered dose inhalers are pressurized aerosol dispensers, typically containing a suspension or solution formulation of the active ingredient in a liquified propellant. During use these devices discharge the formulation through a valve adapted to deliver a metered volume to produce a fine particle spray containing the active ingredient. Suitable propellants include certain chlorofluorocarbon compounds, for example, dichlorodifluoromethane, trichlorofluoromethane, dichlorotetrafluoroethane and mixtures thereof. The formulation can additionally contain one or more co-solvents, for example, ethanol, emulsifiers and other formulation surfactants, such as oleic acid or sorbitan trioleate, anti-oxidants and suitable flavoring agents. Other methods for pulmonary delivery are described in, for example US Patent Application No. 20040037780, and U.S. Pat. Nos. 6,592,904; 6,582,728; 6,565,885, all incorporated by reference herein.

[0528] In one embodiment, the invention features the use of methods to deliver the nucleic acid molecules of the instant invention to the central nervous system and/or peripheral nervous system. Experiments have demonstrated the efficient in vivo uptake of nucleic acids by neurons. As an example of local administration of nucleic acids to nerve cells, Sommer et al., 1998, Antisense Nuc. Acid Drug Dev., 8, 75, describe a study in which a 15mer phosphorothioate antisense nucleic acid molecule to c-fos is administered to rats via microinjection into the brain. Antisense molecules labeled with tetramethylrhodamine-isothiocyanate (TRITC) or fluorescein isothiocyanate (FITC) were taken up by exclusively by neurons thirty minutes post-injection. A diffuse cytoplasmic staining and nuclear staining was observed in these cells. As an example of systemic administration of nucleic acid to nerve cells, Epa et al., 2000, Antisense Nuc. Acid Drug Dev., 10, 469, describe an in vivo mouse study in which beta-cyclodextrin-adamantane-oligonucleotide conjugates were used to target the p75 neurotrophin receptor in neuronally differentiated PC12 cells. Following a two week course of IP administration, pronounced uptake of p75 neurotrophin receptor antisense was observed in dorsal root ganglion (DRG) cells. In addition, a marked and consistent down-regulation of p75 was observed in DRG neurons. Additional approaches to the targeting of nucleic acid to neurons are described in Broaddus et al., 1998, J. Neurosurg., 88(4), 734; Karle et al., 1997, Eur. J Pharmocol., 340(2/3), 153; Bannai et al., 1998, Brain Research, 784(1,2), 304; Rajakumar et al., 1997, Synapse, 26(3), 199; Wu-pong et al., 1999, BioPharm, 12(1), 32; Bannai et al., 1998, Brain Res. Protoc., 3(1), 83; Simantov et al., 1996, Neuroscience, 74(1), 39. Nucleic acid molecules of the invention are therefore amenable to delivery to and uptake by cells that express repeat expansion allelic variants for modulation of RE gene expression. The delivery of nucleic acid molecules of the invention, targeting RE is provided by a variety of different strategies. Traditional approaches to CNS delivery that can be used include, but are not limited to, intrathecal and intracerebroventricular administration, implantation of catheters and pumps, direct injection or perfusion at the site of injury or lesion, injection into the brain arterial system, or by chemical or osmotic opening of the blood-brain barrier. Other approaches can include the use of various transport and carrier systems, for example though the use of conjugates and biodegradable polymers. Furthermore, gene therapy approaches, for example as described in Kaplitt et al., U.S. Pat. No. 6,180,613 and Davidson, WO 04/013280, can be used to express nucleic acid molecules in the CNS.

[0529] The delivery of nucleic acid molecules of the invention to the CNS is provided by a variety of different strategies. Traditional approaches to CNS delivery that can be used include, but are not limited to, intrathecal and intracerebroventricular administration, implantation of catheters and pumps, direct injection or perfusion at the site of injury or lesion, injection into the brain arterial system, or by chemical or osmotic opening of the blood-brain barrier. Other approaches can include the use of various transport and carrier systems, for example though the use of conjugates and biodegradable polymers. Furthermore, gene therapy approaches, for example as described in Kaplitt et al., U.S. Pat. No. 6,180,613 and Davidson, WO 04/013280, can be used to express nucleic acid molecules in the CNS.

[0530] In one embodiment, siNA compounds and compositions of the invention are administered either systemically or locally about every 1-50 weeks (e.g., about every 1, 2, 3, 4, 5, 6, 7, 8, 9, 10, 11, 12, 13, 14, 15, 16, 17, 18, 19, 20, 21, 22, 23, 24, 25, 26, 27, 28, 29, 30, 31, 32, 33, 34,35, 36, 37, 38, 39, 40, 41, 42, 43, 44, 45, 46, 47, 48, 49, or 50 weeks), alone or in combination with other comounds and/or therapeis herein. In one embodiment, siNA compounds and compositions of the invention are administered systemically (e.g., via intravenous, subcutaneous, intramuscular, infusion, pump, implant etc.) about every 1-50 weeks (e.g., about every 1, 2, 3, 4, 5, 6, 7, 8, 9, 10, 11, 12, 13, 14, 15, 16, 17, 18, 19, 20, 21, 22, 23, 24, 25, 26, 27, 28, 29, 30, 31, 32, 33, 34, 35, 36, 37, 38, 39, 40, 41, 42, 43, 44, 45, 46, 47, 48, 49, or 50 weeks), alone or in combination with other comounds and/or therapies described herein and/or otherwise known in the art.

[0531] In one embodiment, a siNA molecule of the invention is administered iontophoretically, for example to a particular organ or compartment (e.g., liver, tumor, CNS etc.). Non-limiting examples of iontophoretic delivery are described in, for example, WO 03/043689 and WO 03/030989, which are incorporated by reference in their entireties herein.

[0532] In one embodiment, the siNA molecules of the invention and formulations or compositions thereof are administered to the liver as is generally known in the art (see for example Wen et al., 2004, World J. Gastroenterol., 10, 244-9; Murao et al., 2002, Pharm Res., 19, 1808-14; Liu et al., 2003, Gene Ther., 10, 180-7; Hong et al., 2003, J. Pharm Pharmacol., 54, 51-8; Herrmann et al., 2004, Arch Virol., 149, 1611-7; and Matsuno et al., 2003, Gene Ther., 10, 1559-66).

[0533] In one embodiment, the invention features the use of methods to deliver the nucleic acid molecules of the instant invention to hematopoietic cells, including monocytes and lymphocytes. These methods are described in detail by Hartmann et al., 1998, J. Phamacol. Exp. Ther., 285(2), 920-928; Kronenwett et al., 1998, Blood, 91(3), 852-862; Filion and Phillips, 1997, Biochim. Biophys. Acta., 1329(2), 345-356; Ma and Wei, 1996, Leuk. Res., 20(11/12), 925-930; and Bongartz et al., 1994, Nucleic Acids Research, 22(22), 4681-8. Such methods, as described above, include the use of free oligonucleitide, cationic lipid formulations, liposome formulations including pH sensitive liposomes and immunoliposomes, and bioconjugates including oligonucleotides conjugated to fusogenic peptides, for the transfection of hematopoietic cells with oligonucleotides.

[0534] In one embodiment, the siNA molecules of the invention and formulations or compositions thereof are administered directly or topically (e.g., locally) to the dermis or follicles as is generally known in the art (see for example Brand, 2001, Curr. Opin. Mol. Ther., 3, 244-8; Regnier et al., 1998, J. Drug Target, 5, 275-89; Kanikkannan, 2002, BioDrugs, 16, 339-47; Wraight et al., 2001, Pharmacol. Ther., 90, 89-104; and Preat and Dujardin, 2001, STP PharmaSciences, 11, 57-68). In one embodiment, the siNA molecules of the invention and formulations or compositions thereof are administered directly or topically using a hydroalcoholic gel formulation comprising an alcohol (e.g., ethanol or isopropanol), water, and optionally including additional agents such isopropyl myristate and carbomer 980.

[0535] In one embodiment, delivery systems of the invention include, for example, aqueous and nonaqueous gels, creams, multiple emulsions, microemulsions, liposomes, ointments, aqueous and nonaqueous solutions, lotions, aerosols, hydrocarbon bases and powders, and can contain excipients such as solubilizers, permeation enhancers (e.g., fatty acids, fatty acid esters, fatty alcohols and amino acids), and hydrophilic polymers (e.g., polycarbophil and polyvinylpyrolidone). In one embodiment, the pharmaceutically acceptable carrier is a liposome or a transdermal enhancer. Examples of liposomes which can be used in this invention include the following: (1) CellFectin, 1:1.5 (M/M) liposome formulation of the cationic lipid N,NI,NII,NIII-tetramethyl-N,NI,NII,NIII-tetrapalmit-y-spermine and dioleoyl phosphatidylethanolamine (DOPE) (GIBCO BRL); (2) Cytofectin GSV, 2:1 (M/M) liposome formulation of a cationic lipid and DOPE (Glen Research); (3) DOTAP (N-[1-(2,3-dioleoyloxy)-N,N,N-tri-methyl-ammoniummethylsulfate) (Boehringer Manheim); and (4) Lipofectamine, 3:1 (M/M) liposome formulation of the polycationic lipid DOSPA and the neutral lipid DOPE (GIBCO BRL).

[0536] In one embodiment, delivery systems of the invention include patches, tablets, suppositories, pessaries, gels and creams, and can contain excipients such as solubilizers and enhancers (e.g., propylene glycol, bile salts and amino acids), and other vehicles (e.g., polyethylene glycol, fatty acid esters and derivatives, and hydrophilic polymers such as hydroxypropylmethylcellulose and hyaluronic acid).

[0537] In one embodiment, siNA molecules of the invention are formulated or complexed with polyethylenimine (e.g., linear or branched PEI) and/or polyethylenimine derivatives, including for example grafted PEIs such as galactose PEI, cholesterol PEI, antibody derivatized PEI, and polyethylene glycol PEI (PEG-PEI) derivatives thereof (see for example Ogris et al., 2001, AAPA PharmSci, 3, 1-11; Furgeson et al., 2003, Bioconjugate Chem., 14, 840-847; Kunath et al., 2002, Phramaceutical Research, 19, 810-817; Choi et al., 2001, Bull. Korean Chem. Soc., 22, 46-52; Bettinger et al., 1999, Bioconjugate Chem., 10, 558-561; Peterson et al., 2002, Bioconjugate Chem., 13, 845-854; Erbacher et al., 1999, Journal of Gene Medicine Preprint, 1, 1-18; Godbey et al., 1999., PNAS USA, 96, 5177-5181; Godbey et al., 1999, Journal of Controlled Release, 60, 149-160; Diebold et al., 1999, Journal of Biological Chemistry, 274, 19087-19094; Thomas and Klibanov, 2002, PNAS USA, 99, 14640-14645; and Sagara, U.S. Pat. No. 6,586,524, incorporated by reference herein.

[0538] In one embodiment, a siNA molecule of the invention comprises a bioconjugate, for example a nucleic acid conjugate as described in Vargeese et al., U.S. Ser. No. 10/427,160, filed Apr. 30, 2003; U.S. Pat. No. 6,528,631; U.S. Pat. No. 6,335,434; U.S. Pat. No. 6,235,886; U.S. Pat. No. 6,153,737; U.S. Pat. No. 5,214,136; U.S. Pat. No. 5,138,045, all incorporated by reference herein.

[0539] Thus, the invention features a pharmaceutical composition comprising one or more nucleic acid(s) of the invention in an acceptable carrier, such as a stabilizer, buffer, and the like. The polynucleotides of the invention can be administered (e.g., RNA, DNA or protein) and introduced to a subject by any standard means, with or without stabilizers, buffers, and the like, to form a pharmaceutical composition. When it is desired to use a liposome delivery mechanism, standard protocols for formation of liposomes can be followed. The compositions of the present invention can also be formulated and used as creams, gels, sprays, oils and other suitable compositions for topical, dermal, or transdermal administration as is known in the art.

[0540] The present invention also includes pharmaceutically acceptable formulations of the compounds described. These formulations include salts of the above compounds, e.g., acid addition salts, for example, salts of hydrochloric, hydrobromic, acetic acid, and benzene sulfonic acid.

[0541] A pharmacological composition or formulation refers to a composition or formulation in a form suitable for administration, e.g., systemic or local administration, into a cell or subject, including for example a human. Suitable forms, in part, depend upon the use or the route of entry, for example oral, transdermal, or by injection. Such forms should not prevent the composition or formulation from reaching a target cell (i.e., a cell to which the negatively charged nucleic acid is desirable for delivery). For example, pharmacological compositions injected into the blood stream should be soluble. Other factors are known in the art, and include considerations such as toxicity and forms that prevent the composition or formulation from exerting its effect.

[0542] In one embodiment, siNA molecules of the invention are administered to a subject by systemic administration in a pharmaceutically acceptable composition or formulation. By “systemic administration” is meant in vivo systemic absorption or accumulation of drugs in the blood stream followed by distribution throughout the entire body. Administration routes that lead to systemic absorption include, without limitation: intravenous, subcutaneous, portal vein, intraperitoneal, inhalation, oral, intrapulmonary and intramuscular. Each of these administration routes exposes the siNA molecules of the invention to an accessible diseased tissue. The rate of entry of a drug into the circulation has been shown to be a function of molecular weight or size. The use of a liposome or other drug carrier comprising the compounds of the instant invention can potentially localize the drug, for example, in certain tissue types, such as the tissues of the reticular endothelial system (RES). A liposome formulation that can facilitate the association of drug with the surface of cells, such as, lymphocytes and macrophages is also useful. This approach can provide enhanced delivery of the drug to target cells by taking advantage of the specificity of macrophage and lymphocyte immune recognition of abnormal cells.

[0543] By “pharmaceutically acceptable formulation” or “pharmaceutically acceptable composition” is meant, a composition or formulation that allows for the effective distribution of the nucleic acid molecules of the instant invention in the physical location most suitable for their desired activity. Non-limiting examples of agents suitable for formulation with the nucleic acid molecules of the instant invention include: P-glycoprotein inhibitors (such as Pluronic P85); biodegradable polymers, such as poly (DL-lactide-coglycolide) microspheres for sustained release delivery (Emerich, D F et al, 1999, Cell Transplant, 8, 47-58); and loaded nanoparticles, such as those made of polybutylcyanoacrylate. Other non-limiting examples of delivery strategies for the nucleic acid molecules of the instant invention include material described in Boado et al., 1998, J. Pharm. Sci., 87, 1308-1315; Tyler et al., 1999, FEBS Lett., 421, 280-284; Pardridge et al., 1995, PNAS USA., 92, 5592-5596; Boado, 1995, Adv. Drug Delivery Rev., 15, 73-107; Aldrian-Herrada et al., 1998, Nucleic Acids Res., 26, 4910-4916; and Tyler et al., 1999, PNAS USA., 96, 7053-7058.

[0544] The invention also features the use of a composition comprising surface-modified liposomes containing poly (ethylene glycol) lipids (PEG-modified, or long-circulating liposomes or stealth liposomes) and nucleic acid molecules of the invention. These formulations offer a method for increasing the accumulation of drugs (e.g., siNA) in target tissues. This class of drug carriers resists opsonization and elimination by the mononuclear phagocytic system (MPS or RES), thereby enabling longer blood circulation times and enhanced tissue exposure for the encapsulated drug (Lasic et al. Chem. Rev. 1995, 95, 2601-2627; Ishiwata et al., Chem. Pharm. Bull. 1995, 43, 1005-1011). Such liposomes have been shown to accumulate selectively in tumors, presumably by extravasation and capture in the neovascularized target tissues (Lasic et al., Science 1995, 267, 1275-1276; Oku et al., 1995, Biochim. Biophys. Acta, 1238, 86-90). The long-circulating liposomes enhance the pharmacokinetics and pharmacodynamics of DNA and RNA, particularly compared to conventional cationic liposomes which are known to accumulate in tissues of the MPS (Liu et al., J. Biol. Chem. 1995, 42, 24864-24870; Choi et al., International PCT Publication No. WO 96/10391; Ansell et al., International PCT Publication No. WO 96/10390; Holland et al., International PCT Publication No. WO 96/10392). Long-circulating liposomes are also likely to protect drugs from nuclease degradation to a greater extent compared to cationic liposomes, based on their ability to avoid accumulation in metabolically aggressive MPS tissues such as the liver and spleen.

[0545] The present invention also includes compositions prepared for storage or administration that include a pharmaceutically effective amount of the desired compounds in a pharmaceutically acceptable carrier or diluent. Acceptable carriers or diluents for therapeutic use are well known in the pharmaceutical art, and are described, for example, in Remington's Pharmaceutical Sciences, Mack Publishing Co. (A.R. Gennaro edit. 1985), hereby incorporated by reference herein. For example, preservatives, stabilizers, dyes and flavoring agents can be provided. These include sodium benzoate, sorbic acid and esters of p-hydroxybenzoic acid. In addition, antioxidants and suspending agents can be used.

[0546] A pharmaceutically effective dose is that dose required to prevent, inhibit the occurrence, or treat (alleviate a symptom to some extent, preferably all of the symptoms) of a disease state. The pharmaceutically effective dose depends on the type of disease, the composition used, the route of administration, the type of mammal being treated, the physical characteristics of the specific mammal under consideration, concurrent medication, and other factors that those skilled in the medical arts will recognize. Generally, an amount between 0.1 mg/kg and 100 mg/kg body weight/day of active ingredients is administered dependent upon potency of the negatively charged polymer.

[0547] The nucleic acid molecules of the invention and formulations thereof can be administered orally, topically, parenterally, by inhalation or spray, or rectally in dosage unit formulations containing conventional non-toxic pharmaceutically acceptable carriers, adjuvants and/or vehicles. The term parenteral as used herein includes percutaneous, subcutaneous, intravascular (e.g., intravenous), intramuscular, or intrathecal injection or infusion techniques and the like. In addition, there is provided a pharmaceutical formulation comprising a nucleic acid molecule of the invention and a pharmaceutically acceptable carrier. One or more nucleic acid molecules of the invention can be present in association with one or more non-toxic pharmaceutically acceptable carriers and/or diluents and/or adjuvants, and if desired other active ingredients. The pharmaceutical compositions containing nucleic acid molecules of the invention can be in a form suitable for oral use, for example, as tablets, troches, lozenges, aqueous or oily suspensions, dispersible powders or granules, emulsion, hard or soft capsules, or syrups or elixirs.

[0548] Compositions intended for oral use can be prepared according to any method known to the art for the manufacture of pharmaceutical compositions and such compositions can contain one or more such sweetening agents, flavoring agents, coloring agents or preservative agents in order to provide pharmaceutically elegant and palatable preparations. Tablets contain the active ingredient in admixture with non-toxic pharmaceutically acceptable excipients that are suitable for the manufacture of tablets. These excipients can be, for example, inert diluents; such as calcium carbonate, sodium carbonate, lactose, calcium phosphate or sodium phosphate; granulating and disintegrating agents, for example, corn starch, or alginic acid; binding agents, for example starch, gelatin or acacia; and lubricating agents, for example magnesium stearate, stearic acid or talc. The tablets can be uncoated or they can be coated by known techniques. In some cases such coatings can be prepared by known techniques to delay disintegration and absorption in the gastrointestinal tract and thereby provide a sustained action over a longer period. For example, a time delay material such as glyceryl monosterate or glyceryl distearate can be employed.

[0549] Formulations for oral use can also be presented as hard gelatin capsules wherein the active ingredient is mixed with an inert solid diluent, for example, calcium carbonate, calcium phosphate or kaolin, or as soft gelatin capsules wherein the active ingredient is mixed with water or an oil medium, for example peanut oil, liquid paraffin or olive oil.

[0550] Aqueous suspensions contain the active materials in a mixture with excipients suitable for the manufacture of aqueous suspensions. Such excipients are suspending agents, for example sodium carboxymethylcellulose, methylcellulose, hydropropyl-methylcellulose, sodium alginate, polyvinylpyrrolidone, gum tragacanth and gum acacia; dispersing or wetting agents can be a naturally-occurring phosphatide, for example, lecithin, or condensation products of an alkylene oxide with fatty acids, for example polyoxyethylene stearate, or condensation products of ethylene oxide with long chain aliphatic alcohols, for example heptadecaethyleneoxycetanol, or condensation products of ethylene oxide with partial esters derived from fatty acids and a hexitol such as polyoxyethylene sorbitol monooleate, or condensation products of ethylene oxide with partial esters derived from fatty acids and hexitol anhydrides, for example polyethylene sorbitan monooleate. The aqueous suspensions can also contain one or more preservatives, for example ethyl, or n-propyl p-hydroxybenzoate, one or more coloring agents, one or more flavoring agents, and one or more sweetening agents, such as sucrose or saccharin.

[0551] Oily suspensions can be formulated by suspending the active ingredients in a vegetable oil, for example arachis oil, olive oil, sesame oil or coconut oil, or in a mineral oil such as liquid paraffin. The oily suspensions can contain a thickening agent, for example beeswax, hard paraffin or cetyl alcohol. Sweetening agents and flavoring agents can be added to provide palatable oral preparations. These compositions can be preserved by the addition of an anti-oxidant such as ascorbic acid

[0552] Dispersible powders and granules suitable for preparation of an aqueous suspension by the addition of water provide the active ingredient in admixture with a dispersing or wetting agent, suspending agent and one or more preservatives. Suitable dispersing or wetting agents or suspending agents are exemplified by those already mentioned above. Additional excipients, for example sweetening, flavoring and coloring agents, can also be present.

[0553] Pharmaceutical compositions of the invention can also be in the form of oil-in-water emulsions. The oily phase can be a vegetable oil or a mineral oil or mixtures of these. Suitable emulsifying agents can be naturally-occurring gums, for example gum acacia or gum tragacanth, naturally-occurring phosphatides, for example soy bean, lecithin, and esters or partial esters derived from fatty acids and hexitol, anhydrides, for example sorbitan monooleate, and condensation products of the said partial esters with ethylene oxide, for example polyoxyethylene sorbitan monooleate. The emulsions can also contain sweetening and flavoring agents.

[0554] Syrups and elixirs can be formulated with sweetening agents, for example glycerol, propylene glycol, sorbitol, glucose or sucrose. Such formulations can also contain a demulcent, a preservative and flavoring and coloring agents. The pharmaceutical compositions can be in the form of a sterile injectable aqueous or oleaginous suspension. This suspension can be formulated according to the known art using those suitable dispersing or wetting agents and suspending agents that have been mentioned above. The sterile injectable preparation can also be a sterile injectable solution or suspension in a non-toxic parentally acceptable diluent or solvent, for example as a solution in 1,3-butanediol. Among the acceptable vehicles and solvents that can be employed are water, Ringer's solution and isotonic sodium chloride solution. In addition, sterile, fixed oils are conventionally employed as a solvent or suspending medium. For this purpose, any bland fixed oil can be employed including synthetic mono-or diglycerides. In addition, fatty acids such as oleic acid find use in the preparation of injectables.

[0555] The nucleic acid molecules of the invention can also be administered in the form of suppositories, e.g., for rectal administration of the drug. These compositions can be prepared by mixing the drug with a suitable non-irritating excipient that is solid at ordinary temperatures but liquid at the rectal temperature and will therefore melt in the rectum to release the drug. Such materials include cocoa butter and polyethylene glycols.

[0556] Nucleic acid molecules of the invention can be administered parenterally in a sterile medium. The drug, depending on the vehicle and concentration used, can either be suspended or dissolved in the vehicle. Advantageously, adjuvants such as local anesthetics, preservatives and buffering agents can be dissolved in the vehicle.

[0557] Dosage levels of the order of from about 0.1 mg to about 140 mg per kilogram of body weight per day are useful in the treatment of the above-indicated conditions (about 0.5 mg to about 7 g per subject per day). The amount of active ingredient that can be combined with the carrier materials to produce a single dosage form varies depending upon the host treated and the particular mode of administration. Dosage unit forms generally contain between from about 1 mg to about 500 mg of an active ingredient.

[0558] It is understood that the specific dose level for any particular subject depends upon a variety of factors including the activity of the specific compound employed, the age, body weight, general health, sex, diet, time of administration, route of administration, and rate of excretion, drug combination and the severity of the particular disease undergoing therapy.

[0559] For administration to non-human animals, the composition can also be added to the animal feed or drinking water. It can be convenient to formulate the animal feed and drinking water compositions so that the animal takes in a therapeutically appropriate quantity of the composition along with its diet. It can also be convenient to present the composition as a premix for addition to the feed or drinking water.

[0560] The nucleic acid molecules of the present invention can also be administered to a subject in combination with other therapeutic compounds to increase the overall therapeutic effect. The use of multiple compounds to treat an indication can increase the beneficial effects while reducing the presence of side effects.

[0561] In one embodiment, the invention comprises compositions suitable for administering nucleic acid molecules of the invention to specific cell types. For example, the asialoglycoprotein receptor (ASGPr) (Wu and Wu, 1987, J. Biol. Chem. 262, 4429-4432) is unique to hepatocytes and binds branched galactose-terminal glycoproteins, such as asialoorosomucoid (ASOR). In another example, the folate receptor is overexpressed in many cancer cells. Binding of such glycoproteins, synthetic glycoconjugates, or folates to the receptor takes place with an affinity that strongly depends on the degree of branching of the oligosaccharide chain, for example, triatennary structures are bound with greater affinity than biatenarry or monoatennary chains (Baenziger and Fiete, 1980, Cell, 22, 611-620; Connolly et al., 1982, J. Biol. Chem., 257, 939-945). Lee and Lee, 1987, Glycoconjugate J., 4, 317-328, obtained this high specificity through the use of N-acetyl-D-galactosamine as the carbohydrate moiety, which has higher affinity for the receptor, compared to galactose. This “clustering effect” has also been described for the binding and uptake of mannosyl-terminating glycoproteins or glycoconjugates (Ponpipom et al., 1981, J. Med. Chem., 24, 1388-1395). The use of galactose, galactosamine, or folate based conjugates to transport exogenous compounds across cell membranes can provide a targeted delivery approach to, for example, the treatment of liver disease, cancers of the liver, or other cancers. The use of bioconjugates can also provide a reduction in the required dose of therapeutic compounds required for treatment. Furthermore, therapeutic bioavailability, pharmacodynamics, and pharmacokinetic parameters can be modulated through the use of nucleic acid bioconjugates of the invention. Non-limiting examples of such bioconjugates are described in Vargeese et al., U.S. Ser. No. 10/201,394, filed Aug. 13, 2001; and Matulic-Adamic et al., U.S. Ser. No. 60/362,016, filed Mar. 6, 2002.

[0562] Alternatively, certain siNA molecules of the instant invention can be expressed within cells from eukaryotic promoters (e.g., Izant and Weintraub, 1985, Science, 229, 345; McGarry and Lindquist, 1986, Proc. Natl. Acad. Sci., USA 83, 399; Scanlon et al., 1991, Proc. Natl. Acad. Sci. USA, 88, 10591-5; Kashani-Sabet et al., 1992, Antisense Res. Dev., 2, 3-15; Dropulic et al., 1992, J. Virol., 66, 1432-41; Weerasinghe et al., 1991, J. Virol., 65, 5531-4; Ojwang et al., 1992, Proc. Natl. Acad. Sci. USA, 89, 10802-6; Chen et al., 1992, Nucleic Acids Res., 20, 4581-9; Sarver et al., 1990 Science, 247, 1222-1225; Thompson et al., 1995, Nucleic Acids Res., 23, 2259; Good et al., 1997, Gene Therapy, 4, 45. Those skilled in the art realize that any nucleic acid can be expressed in eukaryotic cells from the appropriate DNA/RNA vector. The activity of such nucleic acids can be augmented by their release from the primary transcript by a enzymatic nucleic acid (Draper et al., PCT WO 93/23569, and Sullivan et al., PCT WO 94/02595; Ohkawa et al., 1992, Nucleic Acids Symp. Ser., 27, 15-6; Taira et al., 1991, Nucleic Acids Res., 19, 5125-30; Ventura et al., 1993, Nucleic Acids Res., 21, 3249-55; Chowrira et al., 1994, J. Biol. Chem., 269, 25856.

[0563] In another aspect of the invention, RNA molecules of the present invention can be expressed from transcription units (see for example Couture et al., 1996, TIG., 12, 510) inserted into DNA or RNA vectors. The recombinant vectors can be DNA plasmids or viral vectors. siNA expressing viral vectors can be constructed based on, but not limited to, adeno-associated virus, retrovirus, adenovirus, or alphavirus. In another embodiment, pol III based constructs are used to express nucleic acid molecules of the invention (see for example Thompson, U.S. Pat. Nos. 5,902,880 and 6,146,886). The recombinant vectors capable of expressing the siNA molecules can be delivered as described above, and persist in target cells. Alternatively, viral vectors can be used that provide for transient expression of nucleic acid molecules. Such vectors can be repeatedly administered as necessary. Once expressed, the siNA molecule interacts with the target mRNA and generates an RNAi response. Delivery of siNA molecule expressing vectors can be systemic, such as by intravenous or intra-muscular administration, by administration to target cells ex-planted from a subject followed by reintroduction into the subject, or by any other means that would allow for introduction into the desired target cell (for a review see Couture et al., 1996, TIG., 12, 510).

[0564] In one aspect the invention features an expression vector comprising a nucleic acid sequence encoding at least one siNA molecule of the instant invention. The expression vector can encode one or both strands of a siNA duplex, or a single self-complementary strand that self hybridizes into a siNA duplex. The nucleic acid sequences encoding the siNA molecules of the instant invention can be operably linked in a manner that allows expression of the siNA molecule (see for example Paul et al., 2002, Nature Biotechnology, 19, 505; Miyagishi and Taira, 2002, Nature Biotechnology, 19, 497; Lee et al., 2002, Nature Biotechnology, 19, 500; and Novina et al., 2002, Nature Medicine, advance online publication doi:10.1038/nm725).

[0565] In another aspect, the invention features an expression vector comprising: a) a transcription initiation region (e.g., eukaryotic pol I, II or III initiation region); b) a transcription termination region (e.g., eukaryotic pol I, II or III termination region); and c) a nucleic acid sequence encoding at least one of the siNA molecules of the instant invention, wherein said sequence is operably linked to said initiation region and said termination region in a manner that allows expression and/or delivery of the siNA molecule. The vector can optionally include an open reading frame (ORF) for a protein operably linked on the 5′ side or the 3′-side of the sequence encoding the siNA of the invention; and/or an intron (intervening sequences).

[0566] Transcription of the siNA molecule sequences can be driven from a promoter for eukaryotic RNA polymerase I (pol I), RNA polymerase II (pol II), or RNA polymerase III (pol III). Transcripts from pol II or pol III promoters are expressed at high levels in all cells; the levels of a given pol II promoter in a given cell type depends on the nature of the gene regulatory sequences (enhancers, silencers, etc.) present nearby. Prokaryotic RNA polymerase promoters are also used, providing that the prokaryotic RNA polymerase enzyme is expressed in the appropriate cells (Elroy-Stein and Moss, 1990, Proc. Natl. Acad. Sci. USA, 87, 6743-7; Gao and Huang 1993, Nucleic Acids Res., 21, 2867-72; Lieber et al., 1993, Methods Enzymol., 217, 47-66; Zhou et al., 1990, Mol. Cell. Biol., 10, 4529-37). Several investigators have demonstrated that nucleic acid molecules expressed from such promoters can function in mammalian cells (e.g. Kashani-Sabet et al., 1992, Antisense Res. Dev., 2, 3-15; Ojwang et al., 1992, Proc. Natl. Acad. Sci. USA, 89, 10802-6; Chen et al., 1992, Nucleic Acids Res., 20, 4581-9; Yu et al., 1993, Proc. Natl. Acad. Sci. USA, 90, 6340-4; L'Huillier et al., 1992, EMBO J., 11, 4411-8; Lisziewicz et al., 1993, Proc. Natl. Acad. Sci. U.S.A., 90, 8000-4; Thompson et al., 1995, Nucleic Acids Res., 23, 2259; Sullenger & Cech, 1993, Science, 262, 1566). More specifically, transcription units such as the ones derived from genes encoding U6 small nuclear (snRNA), transfer RNA (tRNA) and adenovirus VA RNA are useful in generating high concentrations of desired RNA molecules such as siNA in cells (Thompson et al., supra; Couture and Stinchcomb, 1996, supra; Noonberg et al., 1994, Nucleic Acid Res., 22, 2830; Noonberg et al., U.S. Pat. No. 5,624,803; Good et al., 1997, Gene Ther., 4, 45; Beigelman et al, International PCT Publication No. WO 96/18736. The above siNA, transcription units can be incorporated into a variety of vectors for introduction into mammalian cells, including but not restricted to, plasmid DNA vectors, viral DNA vectors (such as adenovirus or adeno-associated virus vectors), or viral RNA vectors (such as retroviral or alphavirus vectors) (for a review see Couture and Stinchcomb, 1996, supra).

[0567] In another aspect the invention features an expression vector comprising a nucleic acid sequence encoding at least one of the siNA molecules of the invention in a manner that allows expression of that siNA molecule. The expression vector comprises in one embodiment; a) a transcription initiation region; b) a transcription termination region; and c) a nucleic acid sequence encoding at least one strand of the siNA molecule, wherein the sequence is operably linked to the initiation region and the termination region in a manner that allows expression and/or delivery of the siNA molecule.

[0568] In another embodiment the expression vector comprises: a) a transcription initiation region; b) a transcription termination region; c) an open reading frame; and d) a nucleic acid sequence encoding at least one strand of a siNA molecule, wherein the sequence is operably linked to the 3′-end of the open reading frame and wherein the sequence is operably linked to the initiation region, the open reading frame and the termination region in a manner that allows expression and/or delivery of the siNA molecule. In yet another embodiment, the expression vector comprises: a) a transcription initiation region; b) a transcription termination region; c) an intron; and d) a nucleic acid sequence encoding at least one siNA molecule, wherein the sequence is operably linked to the initiation region, the intron and the termination region in a manner which allows expression and/or delivery of the nucleic acid molecule.

[0569] In another embodiment, the expression vector comprises: a) a transcription initiation region; b) a transcription termination region; c) an intron; d) an open reading frame; and e) a nucleic acid sequence encoding at least one strand of a siNA molecule, wherein the sequence is operably linked to the 3′-end of the open reading frame and wherein the sequence is operably linked to the initiation region, the intron, the open reading frame and the termination region in a manner which allows expression and/or delivery of the siNA molecule.

HCV Biology and Biochemistry

[0570] In 1989, the Hepatitis C Virus (HCV) was determined to be an RNA virus and was identified as the causative agent of most non-A non-B viral Hepatitis (Choo et al., 1989, Science, 244, 359-362). Unlike retroviruses such as HIV, HCV does not go though a DNA replication phase and no integrated forms of the viral genome into the host chromosome have been detected (Houghton et al., 1991, Hepatology, 14, 381-388). Rather, replication of the coding (plus) strand is mediated by the production of a replicative (minus) strand leading to the generation of several copies of plus strand HCV RNA. The genome consists of a single, large, open-reading frame that is translated into a polyprotein (Kato et al., 1991, FEBS Letters, 280: 325-328). This polyprotein subsequently undergoes post-translational cleavage, producing several viral proteins (Leinbach et al., 1994, Virology, 204:163-169).

[0571] Examination of the 9.5-kilobase genome of HCV has demonstrated that the viral nucleic acid can mutate at a high rate (Smith et al., 1997 Mol. Evol. 45, 238-246). This rate of mutation has led to the evolution of several distinct genotypes of HCV that share approximately 70% sequence identity (Simmonds et al., 1994, J. Gen. Virol. 75, 1053-1061). It is important to note that these sequences are evolutionarily quite distant. For example, the genetic identity between humans and primates such as the chimpanzee is approximately 98%. In addition, it has been demonstrated that an HCV infection in an individual patient is composed of several distinct and evolving quasispecies that have 98% identity at the RNA level. Thus, the HCV genome is hypervariable and continuously changing. Although the HCV genome is hypervariable, there are 3 regions of the genome that are highly conserved. These conserved sequences occur in the 5′ and 3′ non-coding regions as well as the 5′-end of the core protein coding region and are thought to be vital for HCV RNA replication as well as translation of the HCV polyprotein. Thus, therapeutic agents that target these conserved HCV genomic regions may have a significant impact over a wide range of HCV genotypes. Moreover, it is unlikely that drug resistance will occur with enzymatic nucleic acids specific to conserved regions of the HCV genome. In contrast, therapeutic modalities that target inhibition of enzymes such as the viral proteases or helicase are likely to result in the selection for drug resistant strains since the RNA for these viral encoded enzymes is located in the hypervariable portion of the HCV genome.

[0572] After initial exposure to HCV, a patient experiences a transient rise in liver enzymes, which indicates that inflammatory processes are occurring (Alter et al., IN: Seeff L B, Lewis J H, eds. Current Perspectives in Hepatology. New York: Plenum Medical Book Co; 1989:83-89). This elevation in liver enzymes occurs at least 4 weeks after the initial exposure and may last for up to two months (Farci et al., 1991, New England Journal of Medicine. 325, 98-104). Prior to the rise in liver enzymes, it is possible to detect HCV RNA in the patient's serum using RT-PCR analysis (Takahashi et al., 1993, American Journal of Gastroenterology. 88, 240-243). This stage of the disease is called the acute stage and usually goes undetected since 75% of patients with acute viral hepatitis from HCV infection are asymptomatic. The remaining 25% of these patients develop jaundice or other symptoms of hepatitis.

[0573] Although acute HCV infection is a benign disease, as many as 80% of acute HCV patients progress to chronic liver disease as evidenced by persistent elevation of serum alanine aminotransferase (ALT) levels and by continual presence of circulating HCV RNA (Sherlock, 1992, Lancet, 339, 802). The natural progression of chronic HCV infection over a 10 to 20 year period leads to cirrhosis in 20 to 50% of patients (Davis et al., 1993, Infectious Agents and Disease, 2, 150, 154) and progression of HCV infection to hepatocellular carcinoma has been well documented (Liang et al., 1993, Hepatology. 18, 1326-1333; Tong et al., 1994, Western Journal of Medicine, 160, 133-138). There have been no studies that have determined sub-populations that are most likely to progress to cirrhosis and/or hepatocellular carcinoma, thus all patients have equal risk of progression.

[0574] It is important to note that the survival for patients diagnosed with hepatocellular carcinoma is only 0.9 to 12.8 months from initial diagnosis (Takahashi et al., 1993, American Journal of Gastroenterology. 88, 240-243). Treatment of hepatocellular carcinoma with chemotherapeutic agents has not proven effective and only 10% of patients will benefit from surgery due to extensive tumor invasion of the liver (Trinchet et al., 1994, Presse Medicine. 23, 831-833). Given the aggressive nature of primary hepatocellular carcinoma, the only viable treatment alternative to surgery is liver transplantation (Pichlmayr et al., 1994, Hepatology. 20, 33S-40S).

[0575] Upon progression to cirrhosis, patients with chronic HCV infection present with clinical features, which are common to clinical cirrhosis regardless of the initial cause (D'Amico et al., 1986, Digestive Diseases and Sciences. 31, 468-475). These clinical features may include: bleeding esophageal varices, ascites, jaundice, and encephalopathy (Zakim D, Boyer T D. Hepatology a textbook of liver disease. Second Edition Volume 1. 1990 W.B. Saunders Company. Philadelphia). In the early stages of cirrhosis, patients are classified as compensated, the stage at which the patient's liver is still able to detoxify metabolites in the blood-stream although liver tissue damage has occurred. In addition, most patients with compensated liver disease are asymptomatic and the minority with symptoms report only minor symptoms, such as dyspepsia and weakness. In the later stages of cirrhosis, patients are classified as decompensated, the stage at which the ability of the liver to detoxify metabolites in the bloodstream is diminished. It is at the decompensated stage that the clinical features described above present.

[0576] In 1986, D'Amico et al. described the clinical manifestations and survival rates in 1155 patients with both alcoholic and viral associated cirrhosis (D'Amico supra). Of the 1155 patients, 435 (37%) had compensated disease although 70% were asymptomatic at the beginning of the study. The remaining 720 patients (63%) had decompensated liver disease with 78% presenting with a history of ascites, 31% with jaundice, 17% had bleeding and 16% had encephalopathy. Hepatocellular carcinoma was observed in six (0.5%) patients with compensated disease and in 30 (2.6%) patients with decompensated disease.

[0577] Over the course of six years, the patients with compensated cirrhosis developed clinical features of decompensated disease at a rate of 10% per year. In most cases, ascites was the first presentation of decompensation. In addition, hepatocellular carcinoma developed in 59 patients who initially presented with compensated disease by the end of the six-year study.

[0578] With respect to survival, the D'Amico study indicated that the five-year survival rate for all patients in the study was only 40%. The six-year survival rate for the patients who initially had compensated cirrhosis was 54% while the six-year survival rate for patients who initially presented with decompensated disease was only 21%. There were no significant differences in the survival rates between the patients who had alcoholic cirrhosis and the patients with viral related cirrhosis. The major causes of death for the patients in the D'Amico study were liver failure in 49%; hepatocellular carcinoma in 22%; and bleeding in 13% (D'Amico supra).

[0579] Chronic Hepatitis C is a slowly progressing inflammatory disease of the liver, mediated by a virus (HCV) that can lead to cirrhosis, liver failure and/or hepatocellular carcinoma over a period of 10 to 20 years. In the US, it is estimated that infection with HCV accounts for 50,000 new cases of acute hepatitis in the United States each year (NIH Consensus Development Conference Statement on Management of Hepatitis C March 1997). The prevalence of HCV in the United States is estimated at 1.8% and the CDC places the number of chronically infected Americans at approximately 4.5 million people. The CDC also estimates that up to 10,000 deaths per year are caused by chronic HCV infection.

[0580] Numerous well controlled clinical trials using interferon (IFN-alpha) in the treatment of chronic HCV infection have demonstrated that treatment three times a week results in lowering of serum ALT values in approximately 50% (40% -70%) of patients by the end of 6 months of therapy (Davis et al., 1989, New England Journal of Medicine, 321, 1501-1506; Marcellin et al., 1991, Hepatology, 13, 393-397; Tong et al., 1997, Hepatology, 26, 747-754; Tong et al., 1997, Hepatology, 26, 1640-1645). However, following cessation of interferon treatment, approximately 50% of the responding patients relapsed, resulting in a “durable” response rate as assessed by normalization of serum ALT concentrations of approximately 20-25%.

[0581] Direct measurement of HCV RNA is possible through use of either the branched-DNA or Reverse Transcriptase Polymerase Chain Reaction (RT-PCR) analysis. In general, RT-PCR methodology is more sensitive and leads to a more accurate assessment of the clinical course (Tong et al., supra). Studies that have examined six months of type 1 interferon therapy using changes in HCV RNA values as a clinical endpoint have demonstrated that up to 35% of patients have a loss of HCV RNA by the end of therapy (Marcellin et al., supra). However, as with the ALT endpoint, about 50% of the patients relapse within six months following cessation of therapy, resulting in a durable virologic response of only 12% (Marcellin et al., supra). Studies that have examined 48 weeks of therapy have demonstrated that the sustained virological response is up to 25% (NIH consensus statement: 1997). Thus, standard of care for treatment of chronic HCV infection with type 1 interferon is now 48 weeks of therapy using changes in HCV RNA concentrations as the primary assessment of efficacy (Hoofnagle et al., 1997, New England Journal of Medicine, 336, 347-356).

[0582] Side effects resulting from treatment with type 1 interferons can be divided into four general categories, which include: (1) Influenza-like symptoms; (2) Neuropsychiatric; (3) Laboratory abnormalities; and (4) Miscellaneous (Dusheiko et al., 1994, Journal of Viral Hepatitis, 1, 3-5). Examples of influenza-like symptoms include fatigue, fever, myalgia, malaise, appetite loss, tachycardia, rigors, headache, and arthralgias. The influenza-like symptoms are usually short-lived and tend to abate after the first four weeks of dosing (Dushieko et al., supra). Neuropsychiatric side effects include irritability, apathy, mood changes, insomnia, cognitive changes, and depression. The most important of these neuropsychiatric side effects is depression and patients who have a history of depression should not be given type 1 interferon. Laboratory abnormalities include reduction in myeloid cells, including granulocytes, platelets and to a lesser extent red blood cells. These changes in blood cell counts rarely lead to any significant clinical sequellae (Dushieko et al., supra). In addition, increases in triglyceride concentrations and elevations in serum alanine and aspartate aminotransferase concentration have been observed. Finally, thyroid abnormalities have been reported. These thyroid abnormalities are usually reversible after cessation of interferon therapy and can be controlled with appropriate medication while on therapy. Miscellaneous side effects include nausea, diarrhea, abdominal and back pain, pruritus, alopecia, and rhinorrhea. In general, most side effects will abate after 4 to 8 weeks of therapy (Dushieko et al., supra).

[0583] The use of small interfering nucleic acid molecules targeting HCV genes and cellular/host gene targets associated with the HIV life cycle therefore provides a class of novel therapeutic agents that can be used in the treatment and diagnosis of HCV infection, liver failure, hepatocellular carcinoma, cirrhosis or any other disease or condition that responds to modulation (e.g., inhibition) of HCV genes in a subject or organism.

### EXAMPLES

[0584] The following are non-limiting examples showing the selection, isolation, synthesis and activity of nucleic acids of the instant invention.

### Example 1

### Tandem Synthesis of siNA Constructs

[0585] Exemplary siNA molecules of the invention are synthesized in tandem using a cleavable linker, for example, a succinyl-based linker. Tandem synthesis as described herein is followed by a one-step purification process that provides RNAi molecules in high yield. This approach is highly amenable to siNA synthesis in support of high throughput RNAi screening, and can be readily adapted to multi-column or multi-well synthesis platforms.

[0586] After completing a tandem synthesis of a siNA oligo and its complement in which the 5′-terminal dimethoxytrityl (5′-O-DMT) group remains intact (trityl on synthesis), the oligonucleotides are deprotected as described above. Following deprotection, the siNA sequence strands are allowed to spontaneously hybridize. This hybridization yields a duplex in which one strand has retained the 5′-O-DMT group while the complementary strand comprises a terminal 5′-hydroxyl. The newly formed duplex behaves as a single molecule during routine solid-phase extraction purification (Trityl-On purification) even though only one molecule has a dimethoxytrityl group. Because the strands form a stable duplex, this dimethoxytrityl group (or an equivalent group, such as other trityl groups or other hydrophobic moieties) is all that is required to purify the pair of oligos, for example, by using a C18 cartridge.

[0587] Standard phosphoramidite synthesis chemistry is used up to the point of introducing a tandem linker, such as an inverted deoxy abasic succinate or glyceryl succinate linker (see FIG. 1) or an equivalent cleavable linker. A non-limiting example of linker coupling conditions that can be used includes a hindered base such as diisopropylethylamine (DIPA) and/or DMAP in the presence of an activator reagent such as Bromotripyrrolidinophosphoniumhexaflurorophosphate (PyBrOP). After the linker is coupled, standard synthesis chemistry is utilized to complete synthesis of the second sequence leaving the terminal the 5′-O-DMT intact. Following synthesis, the resulting oligonucleotide is deprotected according to the procedures described herein and quenched with a suitable buffer, for example with 50 mM NaOAc or 1.5M NH₄H₂CO₃.

[0588] Purification of the siNA duplex can be readily accomplished using solid phase extraction, for example, using a Waters C18 SepPak 1 g cartridge conditioned with 1 column volume (CV) of acetonitrile, 2 CV H2O, and 2 CV 50 mM NaOAc. The sample is loaded and then washed with 1 CV H2O or 50 mM NaOAc. Failure sequences are eluted with 1 CV 14% ACN (Aqueous with 50 mM NaOAc and 50 mM NaCl). The column is then washed, for example with 1 CV H2O followed by on-column detritylation, for example by passing 1 CV of 1% aqueous trifluoroacetic acid (TFA) over the column, then adding a second CV of 1% aqueous TFA to the column and allowing to stand for approximately 10 minutes. The remaining TFA solution is removed and the column washed with H2O followed by 1 CV 1M NaCl and additional H2O. The siNA duplex product is then eluted, for example, using 1 CV 20% aqueous CAN.

[0589] FIG. 2 provides an example of MALDI-TOF mass spectrometry analysis of a purified siNA construct in which each peak corresponds to the calculated mass of an individual siNA strand of the siNA duplex. The same purified siNA provides three peaks when analyzed by capillary gel electrophoresis (CGE), one peak presumably corresponding to the duplex siNA, and two peaks presumably corresponding to the separate siNA sequence strands. Ion exchange HPLC analysis of the same siNA contract only shows a single peak. Testing of the purified siNA construct using a luciferase reporter assay described below demonstrated the same RNAi activity compared to siNA constructs generated from separately synthesized oligonucleotide sequence strands.

### Example 2

### Identification of Potential siNA Target Sites in any RNA Sequence

[0590] The sequence of an RNA target of interest, such as a viral or human mRNA transcript, is screened for target sites, for example by using a computer folding algorithm. In a non-limiting example, the sequence of a gene or RNA gene transcript derived from a database, such as Genbank, is used to generate siNA targets having complementarity to the target. Such sequences can be obtained from a database, or can be determined experimentally as known in the art. Target sites that are known, for example, those target sites determined to be effective target sites based on studies with other nucleic acid molecules, for example ribozymes or antisense, or those targets known to be associated with a disease, trait, or condition such as those sites containing mutations or deletions, can be used to design siNA molecules targeting those sites. Various parameters can be used to determine which sites are the most suitable target sites within the target RNA sequence. These parameters include but are not limited to secondary or tertiary RNA structure, the nucleotide base composition of the target sequence, the degree of homology between various regions of the target sequence, or the relative position of the target sequence within the RNA transcript. Based on these determinations, any number of target sites within the RNA transcript can be chosen to screen siNA molecules for efficacy, for example by using in vitro RNA cleavage assays, cell culture, or animal models. In a non-limiting example, anywhere from 1 to 1000 target sites are chosen within the transcript based on the size of the siNA construct to be used. High throughput screening assays can be developed for screening siNA molecules using methods known in the art, such as; with multi-well or multi-plate assays to determine efficient reduction in target gene expression.

### Example 3

### Selection of siNA Molecule Target Sites in a RNA

[0591] The following non-limiting steps can be used to carry out the selection of siNAs targeting a given gene sequence or transcript.

[0592] 1. The target sequence is parsed in silico into a list of all fragments or subsequences of a particular length, for example 23 nucleotide fragments, contained within the target sequence. This step is typically carried out using a custom Perl script, but commercial sequence analysis programs such as Oligo, MacVector, or the GCG Wisconsin Package can be employed as well.

[0593] 2. In some instances the siNAs correspond to more than one target sequence; such would be the case for example in targeting different transcripts of the same gene, targeting different transcripts of more than one gene, or for targeting both the human gene and an animal homolog. In this case, a subsequence list of a particular length is generated for each of the targets, and then the lists are compared to find matching sequences in each list. The subsequences are then ranked according to the number of target sequences that contain the given subsequence; the goal is to find subsequences that are present in most or all of the target sequences. Alternately, the ranking can identify subsequences that are unique to a target sequence, such as a mutant target sequence. Such an approach would enable the use of siNA to target specifically the mutant sequence and not effect the expression of the normal sequence.

[0594] 3. In some instances the siNA subsequences are absent in one or more sequences while present in the desired target sequence; such would be the case if the siNA targets a gene with a paralogous family member that is to remain untargeted. As in case 2 above, a subsequence list of a particular length is generated for each of the targets, and then the lists are compared to find sequences that are present in the target gene but are absent in the untargeted paralog.

[0595] 4. The ranked siNA subsequences can be further analyzed and ranked according to GC content. A preference can be given to sites containing 30-70% GC, with a further preference to sites containing 40-60% GC.

[0596] 5. The ranked siNA subsequences can be further analyzed and ranked according to self-folding and internal hairpins. Weaker internal folds are preferred; strong hairpin structures are to be avoided.

[0597] 6. The ranked siNA subsequences can be further analyzed and ranked according to whether they have runs of GGG or CCC in the sequence. GGG (or even more Gs) in either strand can make oligonucleotide synthesis problematic and can potentially interfere with RNAi activity, so it is avoided whenever better sequences are available. CCC is searched in the target strand because that will place GGG in the antisense strand.

[0598] 7. The ranked siNA subsequences can be further analyzed and ranked according to whether they have the dinucleotide UU (uridine dinucleotide) on the 3′-end of the sequence, and/or AA on the 5′-end of the sequence (to yield 3′ UU on the antisense sequence). These sequences allow one to design siNA molecules with terminal TT thymidine dinucleotides.

[0599] 8. Four or five target sites are chosen from the ranked list of subsequences as described above. For example, in subsequences having 23 nucleotides, the right 21 nucleotides of each chosen 23-mer subsequence are then designed and synthesized for the upper (sense) strand of the siNA duplex, while the reverse complement of the left 21 nucleotides of each chosen 23-mer subsequence are then designed and synthesized for the lower (antisense) strand of the siNA duplex (see Table II). If terminal TT residues are desired for the sequence (as described in paragraph 7), then the two 3′ terminal nucleotides of both the sense and antisense strands are replaced by TT prior to synthesizing the oligos.

[0600] 9. The siNA molecules are screened in an in vitro, cell culture or animal model system to identify the most active siNA molecule or the most preferred target site within the target RNA sequence.

[0601] 10. Other design considerations can be used when selecting target nucleic acid sequences, see, for example, Reynolds et al., 2004, Nature Biotechnology Advanced Online Publication, 1 Feb. 2004, doi:10.1038/nbt936 and Ui-Tei et al., 2004, Nucleic Acids Research, 32, doi:10.1093/nar/gkh247.

[0602] In an alternate approach, a pool of siNA constructs specific to a target sequence is used to screen for target sites in cells expressing target RNA, such as cultured Jurkat, HeLa, A549 or 293T cells. The general strategy used in this approach is shown in FIG. 9. Cells expressing the target RNA are transfected with the pool of siNA constructs and cells that demonstrate a phenotype associated with target inhibition are sorted. The pool of siNA constructs can be expressed from transcription cassettes inserted into appropriate vectors (see for example FIG. 7 and FIG. 8). The siNA from cells demonstrating a positive phenotypic change (e.g., decreased proliferation, decreased target mRNA levels or decreased target protein expression), are sequenced to determine the most suitable target site(s) within the target target RNA sequence.

### Example 4

### HCV siNA Design

[0603] siNA target sites were chosen by analyzing sequences of the HCV target and optionally prioritizing the target sites on the basis of folding (structure of any given sequence analyzed to determine siNA accessibility to the target), by using a library of siNA molecules as described in Example 3, or alternately by using an in vitro siNA system as described in Example 6 herein. siNA molecules were designed that could bind each target and are optionally individually analyzed by computer folding to assess whether the siNA molecule can interact with the target sequence. Varying the length of the siNA molecules can be chosen to optimize activity. Generally, a sufficient number of complementary nucleotide bases are chosen to bind to, or otherwise interact with, the target RNA, but the degree of complementarity can be modulated to accommodate siNA duplexes or varying length or base composition. By using such methodologies, siNA molecules can be designed to target sites within any known RNA sequence, for example those RNA sequences corresponding to the any gene transcript.

[0604] Chemically modified siNA constructs are designed to provide nuclease stability for systemic administration in vivo and/or improved pharmacokinetic, localization, and delivery properties while preserving the ability to mediate RNAi activity. Chemical modifications as described herein are introduced synthetically using synthetic methods described herein and those generally known in the art. The synthetic siNA constructs are then assayed for nuclease stability in serum and/or cellular/tissue extracts (e.g. liver extracts). The synthetic siNA constructs are also tested in parallel for RNAi activity using an appropriate assay, such as a luciferase reporter assay as described herein or another suitable assay that can quantity RNAi activity. Synthetic siNA constructs that possess both nuclease stability and RNAi activity can be further modified and re-evaluated in stability and activity assays. The chemical modifications of the stabilized active siNA constructs can then be applied to any siNA sequence targeting any chosen RNA and used, for example, in target screening assays to pick lead siNA compounds for therapeutic development (see for example FIG. 11).

### Example 5

### Chemical Synthesis and Purification of siNA

[0605] siNA molecules can be designed to interact with various sites in the RNA message, for example, target sequences within the RNA sequences described herein. The sequence of one strand of the siNA molecule(s) is complementary to the target site sequences described above. The siNA molecules can be chemically synthesized using methods described herein. Inactive siNA molecules that are used as control sequences can be synthesized by scrambling the sequence of the siNA molecules such that it is not complementary to the target sequence. Generally, siNA constructs can by synthesized using solid phase oligonucleotide synthesis methods as described herein (see for example Usman et al., U.S. Pat. Nos. 5,804,683; 5,831,071; 5,998,203; 6,117,657; 6,353,098; 6,362,323; 6,437,117; 6,469,158; Scaringe et al., U.S. Pat. Nos. 6,111,086; 6,008,400; 6,111,086 all incorporated by reference herein in their entirety).

[0606] In a non-limiting example, RNA oligonucleotides are synthesized in a stepwise fashion using the phosphoramidite chemistry as is known in the art. Standard phosphoramidite chemistry involves the use of nucleosides comprising any of 5′-O-dimethoxytrityl, 2′-O-tert-butyldimethylsilyl, 3′-O-2-Cyanoethyl N,N-diisopropylphosphoroamidite groups, and exocyclic amine protecting groups (e.g. N6-benzoyl adenosine, N4 acetyl cytidine, and N2-isobutyryl guanosine). Alternately, 2′-O-Silyl Ethers can be used in conjunction with acid-labile 2′-O-orthoester protecting groups in the synthesis of RNA as described by Scaringe supra. Differing 2′ chemistries can require different protecting groups, for example 2′-deoxy-2′-amino nucleosides can utilize N-phthaloyl protection as described by Usman et al., U.S. Pat. No. 5,631,360, incorporated by reference herein in its entirety).

[0607] During solid phase synthesis, each nucleotide is added sequentially (3′- to 5′-direction) to the solid support-bound oligonucleotide. The first nucleoside at the 3′-end of the chain is covalently attached to a solid support (e.g., controlled pore glass or polystyrene) using various linkers. The nucleotide precursor, a ribonucleoside phosphoramidite, and activator are combined resulting in the coupling of the second nucleoside phosphoramidite onto the 5′-end of the first nucleoside. The support is then washed and any unreacted 5′-hydroxyl groups are capped with a capping reagent such as acetic anhydride to yield inactive 5′-acetyl moieties. The trivalent phosphorus linkage is then oxidized to a more stable phosphate linkage. At the end of the nucleotide addition cycle, the 5′-O-protecting group is cleaved under suitable conditions (e.g., acidic conditions for trityl-based groups and Fluoride for silyl-based groups). The cycle is repeated for each subsequent nucleotide.

[0608] Modification of synthesis conditions can be used to optimize coupling efficiency, for example by using differing coupling times, differing reagent/phosphoramidite concentrations, differing contact times, differing solid supports and solid support linker chemistries depending on the particular chemical composition of the siNA to be synthesized. Deprotection and purification of the siNA can be performed as is generally described in Usman et al., U.S. Pat. No. 5,831,071, U.S. Pat. No. 6,353,098, U.S. Pat. No. 6,437,117, and Bellon et al., U.S. Pat. No. 6,054,576, U.S. Pat. No. 6,162,909, U.S. Pat. No. 6,303,773, or Scaringe supra, incorporated by reference herein in their entireties. Additionally, deprotection conditions can be modified to provide the best possible yield and purity of siNA constructs. For example, applicant has observed that oligonucleotides comprising 2′-deoxy-2′-fluoro nucleotides can degrade under inappropriate deprotection conditions. Such oligonucleotides are deprotected using aqueous methylamine at about 35° C. for 30 minutes. If the 2′-deoxy-2′-fluoro containing oligonucleotide also comprises ribonucleotides, after deprotection with aqueous methylamine at about 35° C. for 30 minutes, TEA-HF is added and the reaction maintained at about 65° C. for an additional 15 minutes.

### Example 6

### RNAi in Vitro Assay to Assess siNA Activity

[0609] An in vitro assay that recapitulates RNAi in a cell-free system is used to evaluate siNA constructs targeting target RNA targets. The assay comprises the system described by Tuschl et al., 1999, Genes and Development, 13, 3191-3197 and Zamore et al., 2000, Cell, 101, 25-33 adapted for use with a target RNA. A Drosophila extract derived from syncytial blastoderm is used to reconstitute RNAi activity in vitro. Target RNA is generated via in vitro transcription from an appropriate target expressing plasmid using T7 RNA polymerase or via chemical synthesis as described herein. Sense and antisense siNA strands (for example 20 uM each) are annealed by incubation in buffer (such as 100 mM potassium acetate, 30 mM HEPES-KOH, pH 7.4, 2 mM magnesium acetate) for 1 minute at 90° C. followed by 1 hour at 37° C., then diluted in lysis buffer (for example 100 mM potassium acetate, 30 mM HEPES-KOH at pH 7.4, 2 mM magnesium acetate). Annealing can be monitored by gel electrophoresis on an agarose gel in TBE buffer and stained with ethidium bromide. The Drosophila lysate is prepared using zero to two-hour-old embryos from Oregon R flies collected on yeasted molasses agar that are dechorionated and lysed. The lysate is centrifuged and the supernatant isolated. The assay comprises a reaction mixture containing 50% lysate [vol/vol], RNA (10-50 pM final concentration), and 10% [vol/vol] lysis buffer containing siNA (10 nM final concentration). The reaction mixture also contains 10 mM creatine phosphate, 10 ug/ml creatine phosphokinase, 100 um GTP, 100 uM UTP, 100 uM CTP, 500 uM ATP, 5 mM DTT, 0.1 U/uL RNasin (Promega), and 100 uM of each amino acid. The final concentration of potassium acetate is adjusted to 100 mM. The reactions are pre-assembled on ice and preincubated at 25° C. for 10 minutes before adding RNA, then incubated at 25° C. for an additional 60 minutes. Reactions are quenched with 4 volumes of 1.25× Passive Lysis Buffer (Promega). Target RNA cleavage is assayed by RT-PCR analysis or other methods known in the art and are compared to control reactions in which siNA is omitted from the reaction.

[0610] Alternately, internally-labeled target RNA for the assay is prepared by in vitro transcription in the presence of [alpha-³²_{P}] CTP, passed over a G50 Sephadex column by spin chromatography and used as target RNA without further purification. Optionally, target RNA is 5′-³²P-end labeled using T4 polynucleotide kinase enzyme. Assays are performed as described above and target RNA and the specific RNA cleavage products generated by RNAi are visualized on an autoradiograph of a gel. The percentage of cleavage is determined by PHOSPHOR IMAGER® (autoradiography) quantitation of bands representing intact control RNA or RNA from control reactions without siNA and the cleavage products generated by the assay.

[0611] In one embodiment, this assay is used to determine target sites in the target RNA target for siNA mediated RNAi cleavage, wherein a plurality of siNA constructs are screened for RNAi mediated cleavage of the target RNA target, for example, by analyzing the assay reaction by electrophoresis of labeled target RNA, or by northern blotting, as well as by other methodology well known in the art.

### Example 7

### Nucleic Acid Inhibition of HCV Target RNA in Vivo

[0612] siNA molecules targeted to the human HCV RNA are designed and synthesized as described above. These nucleic acid molecules can be tested for cleavage activity in vivo, for example, using the following procedure. The target sequences and the nucleotide location within the HCV RNA are given in Tables II and III.

[0613] Two formats are used to test the efficacy of siNAs targeting HCV. First, the reagents are tested in cell culture using, for example, human hepatoma (Huh7) cells, to determine the extent of RNA and protein inhibition. siNA reagents (e.g.; see Tables II and III) are selected against the HCV target as described herein. RNA inhibition is measured after delivery of these reagents by a suitable transfection agent to, for example, cultured epidermal keratinocytes. Relative amounts of target RNA are measured versus actin using real-time PCR monitoring of amplification (eg., ABI 7700 TAQMAN®). A comparison is made to a mixture of oligonucleotide sequences made to unrelated targets or to a randomized siNA control with the same overall length and chemistry, but randomly substituted at each position. Primary and secondary lead reagents are chosen for the target and optimization performed. After an optimal transfection agent concentration is chosen, a RNA time-course of inhibition is performed with the lead siNA molecule. In addition, a cell-plating format can be used to determine RNA inhibition.

[0614] In addition, a cell-plating format can be used to determine RNA inhibition. This system is described in Rice et al., U.S. Pat. No. 5,874,565 and U.S. Pat. No. 6,127,116, both incorporated by reference herein.

Delivery of siNA to Cells

[0615] Huh7b cells stably transfected with the HCV subgenomic replicon Clone A or Ava.5 are seeded, for example, at 8.5×10³ cells per well of a 96-well platein DMEM(Gibco) the day before transfection. siNA (final concentration, for example 25 nM) and cationic lipid Lipofectamine2000 (e.g., final concentration 0.5 ul/well) are complexed in Optimem (Gibco) at 37° C. for 20 minutes inpolypropelyne microtubes. Following vortexing, the complexed siNA is added to each well and incubated for 24-72 hours.

TAQMAN® (Real-Time PCR Monitoring of Amplification) and Lightcycler Quantification of mRNA

[0616] Total RNA is prepared from cells following siNA delivery, for example, using Qiagen RNA purification kits for 6-well or Rneasy extraction kits for 96-well assays. For TAQMAN® analysis (real-time PCR monitoring of amplification), dual-labeled probes are synthesized with the reporter dye, FAM or JOE, covalently linked at the 5′-end and the quencher dye TAMRA conjugated to the 3′-end. One-step RT-PCR amplifications are performed on, for example, an ABI PRISM 7700 Sequence Detector using 50 μL reactions consisting of 10 μl total RNA, 100 nM forward primer, 900 nM reverse primer, 100 nM probe, 1× TaqMan PCR reaction buffer (PE-Applied Biosystems), 5.5 mM MgCl₂, 300 μM each dATP, dCTP, dGTP, and dTTP, 10 U RNase Inhibitor (Promega), 1.25 U AMPLITAQ GOLD® (DNA polymerase) (PE-Applied Biosystems) and 10 U M-MLV Reverse Transcriptase (Promega). The thermal cycling conditions can consist of 30 minutes at 48° C., 10 minutes at 95° C., followed by 40 cycles of 15 seconds at 95° C. and 1 minute at 60° C. Quantitation of mRNA levels is determined relative to standards generated from serially diluted total cellular RNA (300, 100, 33, 11 ng/reaction) and normalizing to β-actin or GAPDH mRNA in parallel TAQMAN® reactions (real-time PCR monitoring of amplification). For each gene of interest an upper and lower primer and a fluorescently labeled probe are designed. Real time incorporation of SYBR Green I dye into a specific PCR product can be measured in glass capillary tubes using a lightcyler. A standard curve is generated for each primer pair using control cRNA. Values are represented as relative expression to GAPDH in each sample.

Western Blotting

[0617] Total RNA is prepared from cells following siNA delivery, for example, using Ambion Rnaqueous 4-PCR purification kit for large scale extractions, or Ambion Rnaqueous-96 purification kit for 96-well assays. For Taqman analysis, dual-labeled probes are synthesized with, for example, the reporter dyes FAM or VIC covalently linked at the 5′-end and the quencher dye TAMARA conjugated to the 3′-end. One-step RT-PCR amplifications are performed on, for example, an ABI PRISM 7700 Sequence detector using 50 uL reactions consisting of 10 uL total RNA, 100 nM forward primer, 100 nM reverse primer, 100 nM probe, 1× TaqMan PCR reaction buffer (PE-Applied Biosystems), 5.5 mM MgCl2, 100 uM each dATP, dCTP, dGTP and dTTP, 0.2 U RNase Inhibitor (Promega), 0.025 U AmpliTaq Gold (PE-Applied Biosystems) and 0.2 U M-MLV Reverse Transcriptase (Promega). The thermal cycling conditions can consist of 30 minutes at 48° C., 10 minutes at 95° C., followed by 40 cycles of 15 seconds at 95° C. and 1 minute at 60° C. Quantitation of target mRNA level is determined relative to standards generated from serially diluted total cellular RNA (300, 100, 30, 10 ng/rxn) and normalizing to, for example, 36B4 mRNA in either parallel or same tube TaqMan reactions. For HCV Replicon mRNA quantitation, PCR primers and probe specific for the neomycin gene were used:

(SEQ ID NO: 2032)

neo-forward primer, 5′-CCGGCTACCTGCCCATTC-3′;

(SEQ ID NO: 2033)

neo-reverse primer, 5′-CCAGATCATCCTGATCGACAAG-3′;

(SEQ ID NO: 2034)

neo-probe, 5′FAM-ACATCGCATCGAGCGAGCACGTAC-
TAMARA3′;

[0618] For normalization, 36B4 PCR primers and probe were used:

(SEQ ID NO: 2035)

36B4-forward primer, 5′-TCTATCATCAACGGGTACAAACGA-
3′;

(SEQ ID NO: 2036)

36B4 reverse primer, 5′-CTTTTCAGCAAGTGGGAAGGTG-3′;

(SEQ ID NO: 2037)

36B4 probe, 5′VIC-CCTGGCCTTGTCTGTGGAGACGGATTA-
TAMARA3′;

### Example 8

### Models Useful to Evaluate the Down-Regulation of HCV Gene Expression

Cell Culture

[0619] Although there have been reports of replication of HCV in cell culture (see below), these systems are difficult to reproduce and have proven unreliable. Therefore, as was the case for development of other anti-HCV therapeutics, such as interferon and ribavirin, after demonstration of safety in animal studies applicant can proceed directly into a clinical feasibility study.

[0620] Several recent reports have documented in vitro growth of HCV in human cell lines (Mizutani et al., Biochem Biophys Res Commun 1996 227(3):822-826; Tagawa et al., Journal of Gasteroenterology and Hepatology 1995 10(5):523-527; Cribier et al., Journal of General Virology 76(10):2485-2491; Seipp et al., Journal of General Virology 1997 78(10)2467-2478; Iacovacci et al., Research Virology 1997 148(2):147-151; Iocavacci et al., Hepatology 1997 26(5) 1328-1337; Ito et al., Journal of General Virology 1996 77(5):1043-1054; Nakajima et al., Journal of Virology 1996 70(5):3325-3329; Mizutani et al., Journal of Virology 1996 70(10):7219-7223; Valli et al., Res Virol 1995 146(4): 285-288; Kato et al., Biochem Biophys Res Comm 1995 206(3):863-869). Replication of HCV has been reported in both T and B cell lines, as well as cell lines derived from human hepatocytes. Detection of low level replication was documented using either RT-PCR based assays or the b-DNA assay. It is important to note that the most recent publications regarding HCV cell cultures document replication for up to 6-months. However, the level of HCV replication observed in these cell lines has not been robust enough for screening of antiviral compounds.

[0621] In addition to cell lines that can be infected with HCV, several groups have reported the successful transformation of cell lines with cDNA clones of full-length or partial HCV genomes (Harada et al., Journal of General Virology, 1995, 76(5)1215-1221; Haramatsu et al., Journal of Viral Hepatitis 1997 4S(1):61-67; Dash et al., American Journal of Pathology 1997 151(2):363-373; Mizuno et al., Gasteroenterology 1995 109(6):1933-40; Yoo et al., Journal Of Virology 1995 69(1):32-38).

[0622] The recent development of subgenomic HCV RNA replicons capable of successfully replicating in the human hepatoma cell line, Huh7, represents a significant advance toward a dependable cell culture model. These replicons contain the neomycin gene upstream of the HCV nonstructural genes allowing for the selection of replicative RNAs in Huh7 cells. Initially, RNA replication was detected at a low frequency (Lohmann et al. Science 1999 285: 110-113) but the identification of replicons with cell-adaptive mutations in the NS5A region has improved the efficiency of replication 10,000-fold (Blight et al. Science 2000 290:1972-1975). Steps in the HCV life cycle, such as translation, protein processing, and RNA replication are recapitulated in the subgenomic replicon systems, but early events (viral attachment and uncoating) and viral assembly is absent. Inclusion of the structural genes of HCV within the replicons results in the production of HCV core and envelope proteins, but virus assembly does not occur (Pietschmann et al. Journal of Virology 2002 76: 4008-4021). Such replicon systems have been used to study siRNA mediated inhibition of HCV RNA, see for example, Randall et al., 2003, PNAS USA, 100, 235-240.

[0623] In several cell culture systems, cationic lipids have been shown to enhance the bioavailability of oligonucleotides to cells in culture (Bennet, et al., 1992, Mol. Pharmacology, 41, 1023-1033). In one embodiment, siNA molecules of the invention are complexed with cationic lipids for cell culture experiments. siNA and cationic lipid mixtures are prepared in serum-free DMEM immediately prior to addition to the cells. DMEM plus additives are warmed to room temperature (about 20-25° C.) and cationic lipid is added to the final desired concentration and the solution is vortexed briefly. siNA molecules are added to the final desired concentration and the solution is again vortexed briefly and incubated for 10 minutes at room temperature. In dose response experiments, the RNA/lipid complex is serially diluted into DMEM following the 10 minute incubation.

Animal Models

[0624] Evaluating the efficacy of anti-HCV agents in animal models is an important prerequisite to human clinical trials. The best characterized animal system for HCV infection is the chimpanzee. Moreover, the chronic hepatitis that results from HCV infection in chimpanzees and humans is very similar. Although clinically relevant, the chimpanzee model suffers from several practical impediments that make use of this model difficult. These include high cost, long incubation requirements and lack of sufficient quantities of animals. Due to these factors, a number of groups have attempted to develop rodent models of chronic hepatitis C infection. While direct infection has not been possible, several groups have reported on the stable transfection of either portions or entire HCV genomes into rodents (Yamamoto et al., Hepatology 1995 22(3): 847-855; Galun et al., Journal of Infectious Disease 1995 172(1):25-30; Koike et al., Journal of general Virology 1995 76(12)3031-3038; Pasquinelli et al., Hepatology 1997 25(3): 719-727; Hayashi et al., Princess Takamatsu Symp 1995 25:1430149; Mariya et al., Journal of General Virology 1997 78(7) 1527-1531; Takehara et al., Hepatology 1995 21(3):746-751; Kawamura et al., Hepatology 1997 25(4): 1014-1021). In addition, transplantation of HCV infected human liver into immunocompromised mice results in prolonged detection of HCV RNA in the animal's blood.

[0625] A method for expressing hepatitis C virus in an in vivo animal model has been developed (Vierling, International PCT Publication No. WO 99/16307). Viable, HCV infected human hepatocytes are transplanted into a liver parenchyma of a scid/scid mouse host. The scid/scid mouse host is then maintained in a viable state, whereby viable, morphologically intact human hepatocytes persist in the donor tissue and hepatitis C virus is replicated in the persisting human hepatocytes. This model provides an effective means for the study of HCV inhibition by enzymatic nucleic acids in vivo.

[0626] As such, these models can be used in evaluating the efficacy of siNA molecules of the invention in inhibiting HCV expression. These models and others can similarly be used to evaluate the safety and efficacy of siNA molecules of the invention in a pre-clinical setting.

### Example 9

### RNAi Mediated Inhibition of Target Gene Expression

In Vitro siNA Mediated Inhibition of Target RNA

[0627] siNA constructs (Table III) are tested for efficacy in reducing HCV RNA expression in, for example, Huh7 cells. Cells are plated approximately 24 hours before transfection in 96-well plates at 5,000-7,500 cells/well, 100 μl/well, such that at the time of transfection cells are 70-90% confluent. For transfection, annealed siNAs are mixed with the transfection reagent (Lipofectamine 2000, Invitrogen) in a volume of 50 μl/well and incubated for 20 minutes at room temperature. The siNA transfection mixtures are added to cells to give a final siNA concentration of 25 nM in a volume of 150 μl. Each siNA transfection mixture is added to 3 wells for triplicate siNA treatments. Cells are incubated at 37° for 24 hours in the continued presence of the siNA transfection mixture. At 24 hours, RNA is prepared from each well of treated cells. The supernatants with the transfection mixtures are first removed and discarded, then the cells are lysed and RNA prepared from each well. Target gene expression following treatment is evaluated by RT-PCR for the target gene and for a control gene (36B4, an RNA polymerase subunit) for normalization. The triplicate data is averaged and the standard deviations determined for each treatment. Normalized data are graphed and the percent reduction of target mRNA by active siNAs in comparison to their respective inverted control siNAs is determined.

### Example 10

### Evaluation of siNA Molecules in Marmosets

[0628] GBV-B is very closely related to human hepatitis C virus and causes hepatitis in tamarins and marmosets. Thus, GBV-B provides a small animal model for testing antiviral compounds and vaccines for HCV infection. This study investigated the efficacy of LNP formulated double stranded siNA molecules targeting HCV RNA sites 304 and 327. The GBV-B model is an excellent system to test whether this therapy is likely to work on humans chronically infected with HCV.

[0629] In the study, 2 animals were inoculated with GBV-B and IV treatment with the active formulated siNA (Sirna Compound Nos. 33149/35180 and 31703/35176, Formulation LNP-086; see Tables III and VI) at 3 mg/kg was initiated one day post infection. Active compositions were formulated as is described in U.S. Provisional patent application No. 60/737,024, filed Nov. 15, 2005. Another 2 animals were inoculated with GBV-B and were untreated to serve as negative controls. The animals were monitored to determine the effect of the therapy of GBV-B infection. Blood draws were performed over the course of the study to determine viral titers. Dosing of formulated siNA in the treated animals was repeated at days 1, 3, and 7 after inoculation at day 0. These animals show a profound inhibition of GBV-B over a three week time course compared to the untreated control animals (see FIG. 30). In addition, an animal with established GBV infection was treated with active formulated siNA (Sirna Compound Nos. 33149/38758 and 31703/38759, Formulation LNP-086; see Tables III and VI) at days 28, 31, and 35 post infection. This animal showed a decrease in viral titer down to the limit of detection following the dosing of active compound (see FIG. 31) compared to historic untreated controls.

### Example 11

### Evaluation of siNA Molecules in Chimpanzees

[0630] This study is used to evaluate double stranded nucleic acid antiviral formulations for the ability to suppress hepatitis C virus (HCV) replication in HCV-infected chimpanzees. The compound formulation contains siNA directed at the HCV viral genome and that mediates degradation of the viral RNA via RNA interference. The compound is administered by IV. The chimpanzees to be used are selected from a group of HCV chronic animals. The study is conducted in two phases: pharmacokinetics and efficacy.

[0631] The pharmacokinetics portion of the study is conducted in two non-HCV-infected animals. Blood samples are obtained at time 0, 15 min, 30 min, 24 hr, and days 3, 7 and 14. Liver biopsies are obtained at 24 hr and 14 days. The efficacy involves testing of the antiviral compound in 2 or more HCV infected chimpanzees.

[0632] Animals receive 4 weekly IV injections with the antiviral siNA formulation. Blood samples are obtained at −4, −2, and 0 weeks, then weekly for 6 weeks, and then every other week for 4 additional weeks. Liver biopsies are obtained at −4 weeks and +4 weeks (one week after last injection). A blood and tissue sampling schedule is shown below. The animals are monitored for blood chemistries and CBC at all bleeds. At the sign of any serious adverse effects, treatment is stopped. For each animal, a total of 11 blood samples are requested to monitor the viral RNA levels in the serum. Liver needle biopsies are requested at two time points for analysis of viral RNA load in the liver, level of siNA compound targeted to liver, the presence of siNA induced viral RNA cleavage products, and changes in liver gene expression. Viral RNA is monitored by real time TaqMan quantitative RT-PCR. Serum samples are extracted in duplicate and run in quadruplicate. Liver RNA levels are run in duplicate.

Schedule for SINA PK Study in 2 Uninfected Chimpanzees

| Days Weeks | | | | | |
|---|---|---|---|---|---|
| Biopsy | Dosing IV | Serum | CBC | Chemistries | Liver |
| Day 0, | X | 10 ml | 2 ml | 3 ml | |
| Day 0, 15 min | | 10 ml | 2 ml | 3 ml | |
| Day 0, 30 min | | 10 ml | 2 ml | 3 ml | |
| Day 1, 24 hr | | 10 ml | 2 ml | 3 ml | X |
| Day 3 | | 10 ml | 2 ml | 3 ml | |
| Day 7 | | 10 ml | 2 ml | 3 ml | |
| Day 14 | | 10 ml | 2 ml | 3 ml | X |

Blood, 1 × SST tube to Lanford Lab. Processed in 1 ml frozen aliquots.
Biopsies frozen.

[0633] Schedule for SINA Efficacy Study in 2 HCV Chronic Chimpanzees

| Weeks | | | | | |
|---|---|---|---|---|---|
| Biopsy | Dosing IV | Serum | CBC | Chemistries | Liver |
| Pre −4 | | 20 ml | 2 ml | 3 ml | X |
| Pre −2 | | 20 ml | 2 ml | 3 ml | |
| Day 0, Wk 0 | X | 20 ml | 2 ml | 3 ml | |
| Day 7, Wk 1 | X | 20 ml | 2 ml | 3 ml | |
| Wk 2 | X | 20 ml | 2 ml | 3 ml | |
| Wk 3 | X | 20 ml | 2 ml | 3 ml | |
| Wk 4 | | 20 ml | 2 ml | 3 ml | X |
| Wk 5 | | 20 ml | 2 ml | 3 ml | |
| Wk 6 | | 20 ml | 2 ml | 3 ml | |
| Wk 8 | | 20 ml | 2 ml | 3 ml | |
| Wk 10 | | 20 ml | 2 ml | 3 ml | |

Blood, 2 × SST tube to Lanford Lab. Processed in 1 ml frozen aliquots.
Biopsies frozen. Divided in half, process half for RNA with RNAzol for viral RNA.

### Example 12

### Safety, Tolerability, PK, PD and Anti-Viral Effects of Single and Multiple Dose Administration of SIRNA-AV34 in Interferon-Naïve and Experienced Patients with Chronic HCV Infection

[0634] The primary objective of this study are to establish the MTD of single and multiple doses of Sirna-AV34 in HCV-positive patients. A secondary objective is to evaluate the single dose and steady-state pharmacokinetics of Sirna-AV34; to evaluate the pharmacodynamics of single and multiple doses of Sirna-AV34; and to assess the effect of single and multiple doses of Sirna-AV34 on indices of viral replication and infectivity.

[0635] This is a Phase I/II, randomized, double-blind, placebo-controlled, single- and multiple-dose escalation study of Sirna-AV34 in patients with chronic hepatitis C infection and compensated hepatic function. Patients meeting eligibility criteria are be enrolled into 4-6 sequential groups for the SAD portion of the study. Each patient is admitted to a clinical research unit for treatment administration and discharged 36 hours after dosing unless further intensive monitoring is considered necessary by the investigator. Patients have daily visits to the clinic for five additional days, and receive a follow-up phone call for SAEs 30 days after dosing. Dose escalation is dependent on safety parameters (physical examination findings, vital signs, adverse events, and laboratory values) from the preceding group.

[0636] At screening for the SAD phase, patients undergo phlebotomy for assessment of serum chemistry, hematology, coagulation parameters, serum beta-HCG (women only), HIV antibody status, HBsAg, alpha feto-protein, quantitative HCV viral RNA and HCV genotyping, and provide urine for urinalysis. During the treatment phase, clinical laboratories (chemistry, hematology, coagulation parameters and urinalysis) are assessed pre-dose, and 24 hours, 3 d and 6 d after dosing. ECG are assessed pre-dose and 4-6 hours and 6 days after dosing. Physical exam is conducted pre-dose and 6 days after dosing. Serum samples for PK analysis are collected pre-dose, and 30 minutes, 1, 2, 3, 4, 6, 8, 12, 24 and 36 hours, and 2, 3, 4, 5, and 6 days after dosing. Assessments of viral RNA and potentially another marker of viral infectivity is performed pre-dose and 1, 2, 3, 4, 5, and 6 days after dosing.

[0637] Once the dose of Sirna-AV34 that is well-tolerated results in approximately 90% reduction in viral load has been determined, patients are enrolled into the MAD portion of the study. Patients from the SAD portion of the study who choose to participate in the MAD phase undergo limited re-screening consisting of interval history, physical exam, clinical laboratory assessment, and quantitative HCV viral RNA. New enrollees undergo full re-screening as outlined for the SAD phase, above. Patients enrolled in once weekly dosing regimen visit the study site weekly×4, 7 days after the last dose, and receive a telephone call for SAEs 30 d after the last dose. Patients randomized to an every other week dosing regimen visit the study site 2 times and have similar post-treatment follow-up. Dose escalation is dependent on safety parameters (physical examination findings, vital signs, adverse events, and laboratory values) from the preceding group.

[0638] During the MAD treatment phase, clinical laboratories (chemistry, hematology, coagulation parameters and urinalysis) are assessed prior to administration of each dose, and 7 days after the last dose. ECG is assessed before the first dose, and 7 days after the last dose. Physical exam is conducted pre-dose, after the last dose and 7 days after the last dose. Serum samples for PK analysis are collected before and 2, 4, 8, 12 and 24 hours after the first dose, before each subsequent dose, and 2, 4, 8, 12 and 24 hours and 7 days after the last dose. Assessments of viral RNA and potentially another marker of viral infectivity is performed prior to the first dose and then weekly up to 7 days after the last dose.

Diagnosis and Main Criteria for Inclusion/Exclusion:

[0639] Men and women who are not of child-bearing potential; 18 to 60 years of age; HCV-positive; elevated ALT at screening and on one other occasion within the prior 6 months; HIV negative; HBsAg negative; normal PT, PTT, hemoglobin, bilirubin, albumin and alpha feto-protein; platelet count>100K; no other known cause of liver disease; either interferon naïve, relapsed after interferon, or non-responder to interferon.

Dosage and Mode of Administration:

[0640] Liquid solution for IV injection, 0.1 to 10 mg/ml of Sirna-AV34. For the SAD portion of the study, the starting dose is TBD, but estimate 1/50 of NOAEL from 4 week monkey toxicology study. Dose to be escalated to MTD. For the MAD portion of the study, the single dose that produces 90% reduction of viral load, if well-tolerated as single doses, will be administered to sequential cohorts dosed either weekly or every other week×4 weeks.

Duration of Patient Participation/Duration of Study/Duration of Treatment:

[0641] For SAD period, duration of treatment will be 42 days (range, 38 to 49) consisting of a 1-14 day screening period, 1-day treatment with 36 hours in inpatient observation, five additional days of outpatient observation and 30 day SAE follow-up (via telephone). During the MAD phase, the same patients, as well as newly-recruited patients as necessary, will be treated for 72 days (range, 65 to 79) consisting of a 0-14 day screening period, 4 week treatment period, 7 day follow-up period and 30 day SAE follow-up (via telephone). As a result, the duration of patient participation for those patients enrolled in both phases of the study may be up to 128 days, not including any intervening periods between the SAD and MAD portions of the study.

Reference Therapy, Dosage and Mode of Administration:

[0642] Placebo will be formulated as a liquid solution for IV injection and be identical in appearance to Sirna-AV34

Criteria for Evaluation

[0643] For Efficacy and Pharmacodynamics, HCV viral RNA will be evaluated possibly along with a novel biologic marker of HCV capsid protein processing or viral infectivity. For Safety, vital signs, adverse events, standard laboratory tests, and physical examinations will be monitored.

Statistical Methods

[0644] Incidence of adverse events, signs, symptoms, ECG parameters and laboratory findings; descriptive statistics of changes in ECG parameters and laboratory values, PK and PD parameters; and exploratory analyses of measures of viral load, replication and infectivity.

[0645] The main objective of the Clinical Plan is to assess the safety and efficacy of Sirna-AV34 as a potential treatment for Chronic Hepatitis C in such a way as to support the Target Profile (TP) and meet requirements for registration. The total number of subjects to be studied in the entire plan is about 1200

[0646] This CP for Sirna-AV34 s designed to validate the TP and to meet regulatory requirements for registration as a treatment for Chronic Hepatitis C. The initial claim will be that Sirna-AV34 is indicated for the treatment of Chronic Hepatitis C in combination with PEG-Interferon and ribavirin in patient non responding to PEG-Interferon and ribavirin, who have compensate liver disease and 18 year of age and older.

[0647] A Phase I/II Dose Escalation study in patients with compensated and previously treated or untreated chronic hepatitis C will establish the safety of multiple dose administration (weekly ascending doses for 4 week or every two weeks for four weeks), the extent of systemic exposure to the compound, and establish a “proof of mechanism” as effective monotherapy through analysis of serum HCV RNA (reduction of 1-2 logs)

[0648] This will be followed by a formal Phase II dose finding study in combination PEG-Interferon and ribavirin in clinically active hepatitis C patients non responding to PEG-Interferon and ribavirin. The 48-week study will provide data on the safety, effectiveness and PK of the triple combination, with Sirna-AV34 administered weekly.

[0649] The Phase III studies will be randomized, placebo-controlled studies which will confirm evidence of efficacy and provide further safety data of the compound. Two pivotal randomized, placebo-controlled multi-national Phase III studies will be designed to confirm efficacy and provide safety data to support registration. Primary efficacy endpoints will be at 24 weeks following the end of 48-week treatment, represented by undetectable HCV RNA and normalization of ALT. At the time of registration, over 1200 patients will have been exposed to Sirna-AV34.

[0650] Sirna-AV34 is a modified anti-HCV siNA consisting of two Sirna duplexes (Sirna compound Nos. 33149/38758 and 31703/38759, formulated as LNP-086, see Tables III and VI) that has the potential to inhibit HCV replication. Sirna-AV34 targets HCV mRNA sites 304 and 327. Sirna-AV34 is expected to improve the patient's overall symptomatic response to conventional therapy (PEG-Interferon and ribavirin), and will provide the best opportunity to safely minimize a subject's susceptibility to the risk of the disability, morbidity and mortality caused by HCV infection.

### Example 13

### Indications

[0651] The present body of knowledge in HCV research indicates the need for methods to assay HCV activity and for compounds that can regulate HCV expression for research, diagnostic, and therapeutic use. As described herein, the nucleic acid molecules of the present invention can be used in assays to diagnose disease state related of HCV levels. In addition, the nucleic acid molecules can be used to treat disease state related to HCV levels.

[0652] Particular degenerative and disease states that can be associated with HCV expression modulation include, but are not limited to, HCV infection, liver failure, hepatocellular carcinoma, cirrhosis, and/or other disease states associated with HCV infection.

### Example 14

### Interferons

[0653] Interferons represent a non-limiting example of a class of compounds that can be used in conjuction with the siNA molecules of the invention for treating the diseases and/or conditions described herein. Type I interferons (IFN) are a class of natural cytokines that includes a family of greater than 25 IFN-α (Pesta, 1986, Methods Enzymol. 119, 3-14) as well as IFN-β, and IFN-ω. Although evolutionarily derived from the same gene (Diaz et al., 1994, Genomics 22, 540-552), there are many differences in the primary sequence of these molecules, implying an evolutionary divergence in biologic activity. All type I IFN share a common pattern of biologic effects that begin with binding of the IFN to the cell surface receptor (Pfeffer & Strulovici, 1992, Transmembrane secondary messengers for IFN-α/β. In: Interferon. Principles and Medical Applications, S. Baron, D. H. Coopenhaver, F. Dianzani, W. R. Fleischmann Jr., T. K. Hughes Jr., G. R. Kimpel, D. W. Niesel, G. J. Stanton, and S. K. Tyring, eds. 151-160). Binding is followed by activation of tyrosine kinases, including the Janus tyrosine kinases and the STAT proteins, which leads to the production of several IFN-stimulated gene products (Johnson et al., 1994, Sci. Am. 270, 68-75). The IFN-stimulated gene products are responsible for the pleotropic biologic effects of type I IFN, including antiviral, antiproliferative, and immunomodulatory effects, cytokine induction, and HLA class I and class II regulation (Pestka et al., 1987, Annu. Rev. Biochem 56, 727). Examples of IFN-stimulated gene products include 2-5-oligoadenylate synthetase (2-5 OAS), β2-microglobulin, neopterin, p68 kinases, and the Mx protein (Chebath & Revel, 1992, The 2-5 A system: 2-5 A synthetase, isospecies and functions. In: Interferon. Principles and Medical Applications, S. Baron, D. H. Coopenhaver, F. Dianzani, W. R. Jr. Fleischmann, T. K. Jr Hughes, G. R. Kimpel, D. W. Niesel, G. J. Stanton, and S. K. Tyring, eds., pp. 225-236; Samuel, 1992, The RNA-dependent P1/eIF-2α protein kinase. In: Interferon. Principles and Medical Applications. S. Baron, D. H. Coopenhaver, F. Dianzani, W. R. Fleischmann Jr., T. K. Hughes Jr., G. R. Kimpel, D. W. Niesel, G. H. Stanton, and S. K. Tyring, eds. 237-250; Horisberger, 1992, MX protein: function and Mechanism of Action. In: Interferon. Principles and Medical Applications. S. Baron, D. H. Coopenhaver, F. Dianzani, W. R. Fleischmann Jr., T. K. Hughes Jr., G. R. Kimpel, D. W. Niesel, G. H. Stanton, and S. K. Tyring, eds. 215-224). Although all type I IFN have similar biologic effects, not all the activities are shared by each type I IFN, and in many cases, the extent of activity varies quite substantially for each IFN subtype (Fish et al, 1989, J. Interferon Res. 9, 97-114; Ozes et al., 1992, J. Interferon Res. 12, 55-59). More specifically, investigations into the properties of different subtypes of IFN-α and molecular hybrids of IFN-α have shown differences in pharmacologic properties (Rubinstein, 1987, J. Interferon Res. 7, 545-551). These pharmacologic differences can arise from as few as three amino acid residue changes (Lee et al., 1982, Cancer Res.42, 1312-1316).

[0654] Eighty-five to 166 amino acids are conserved in the known IFN-α subtypes. Excluding the IFN-α pseudogenes, there are approximately 25 known distinct IFN-α subtypes. Pairwise comparisons of these nonallelic subtypes show primary sequence differences ranging from 2% to 23%. In addition to the naturally occurring IFNs, a non-natural recombinant type I interferon known as consensus interferon (CIFN) has been synthesized as a therapeutic compound (Tong et al., 1997, Hepatology 26, 747-754).

[0655] Interferon is currently in use for at least 12 different indications, including infectious and autoimmune diseases and cancer (Borden, 1992, N. Engl. J. Med. 326, 1491-1492). For autoimmune diseases, IFN has been utilized for treatment of rheumatoid arthritis, multiple sclerosis, and Crohn's disease. For treatment of cancer, IFN has been used alone or in combination with a number of different compounds. Specific types of cancers for which IFN has been used include squamous cell carcinomas, melanomas, hypemephromas, hemangiomas, hairy cell leukemia, and Kaposi's sarcoma. In the treatment of infectious diseases, IFNs increase the phagocytic activity of macrophages and cytotoxicity of lymphocytes and inhibits the propagation of cellular pathogens. Specific indications for which IFN has been used as treatment include hepatitis B, human papillomavirus types 6 and 11 (i.e. genital warts) (Leventhal et al., 1991, N Engl J Med 325, 613-617), chronic granulomatous disease, and hepatitis C virus.

[0656] Numerous well controlled clinical trials using IFN-alpha in the treatment of chronic HCV infection have demonstrated that treatment three times a week results in lowering of serum ALT values in approximately 50% (range 40% to 70%) of patients by the end of 6 months of therapy (Davis et al., 1989, N. Engl. J. Med. 321, 1501-1506; Marcellin et al., 1991, Hepatology 13, 393-397; Tong et al., 1997, Hepatology 26, 747-754; Tong et al., Hepatology 26, 1640-1645). However, following cessation of interferon treatment, approximately 50% of the responding patients relapsed, resulting in a “durable” response rate as assessed by normalization of serum ALT concentrations of approximately 20 to 25%. In addition, studies that have examined six months of type 1 interferon therapy using changes in HCV RNA values as a clinical endpoint have demonstrated that up to 35% of patients will have a loss of HCV RNA by the end of therapy (Tong et al., 1997, supra). However, as with the ALT endpoint, about 50% of the patients relapse six months following cessation of therapy resulting in a durable virologic response of only 12% (23). Studies that have examined 48 weeks of therapy have demonstrated that the sustained virological response is up to 25%.

[0657] Pegylated interferons, i.e., interferons conjugated with polyethylene glycol (PEG), have demonstrated improved characteristics over interferon. Advantages incurred by PEG conjugation can include an improved pharmacokinetic profile compared to interferons lacking PEG, thus imparting more convenient dosing regimes, improved tolerance, and improved antiviral efficacy. Such improvements have been demonstrated in clinical studies of both polyethylene glycol interferon alfa-2a (PEGASYS, Roche) and polyethylene glycol interferon alfa-2b (VIRAFERON PEG, PEG-INTRON, Enzon/Schering Plough).

[0658] siNA molecules in combination with interferons and polyethylene glycol interferons have the potential to improve the effectiveness of treatment of HCV or any of the other indications discussed above. siNA molecules targeting RNAs associated with HCV infection can be used individually or in combination with other therapies such as interferons and polyethylene glycol interferons and to achieve enhanced efficacy.

### Example 15

### Multifunctional siNA Inhibition of Target RNA Expression

Multifunctional siNA Design

[0659] Once target sites have been identified for multifunctional siNA constructs, each strand of the siNA is designed with a complementary region of length, for example, of about 18 to about 28 nucleotides, that is complementary to a different target nucleic acid sequence. Each complementary region is designed with an adjacent flanking region of about 4 to about 22 nucleotides that is not complementary to the target sequence, but which comprises complementarity to the complementary region of the other sequence (see for example FIG. 16). Hairpin constructs can likewise be designed (see for example FIG. 17). Identification of complementary, palindrome or repeat sequences that are shared between the different target nucleic acid sequences can be used to shorten the overall length of the multifunctional siNA constructs (see for example FIGS. 18 and 19).

[0660] In a non-limiting example, three additional categories of additional multifunctional siNA designs are presented that allow a single siNA molecule to silence multiple targets. The first method utilizes linkers to join siNAs (or multiunctional siNAs) in a direct manner. This can allow the most potent siNAs to be joined without creating a long, continuous stretch of RNA that has potential to trigger an interferon response. The second method is a dendrimeric extension of the overlapping or the linked multifunctional design; or alternatively the organization of siNA in a supramolecular format. The third method uses helix lengths greater than 30 base pairs. Processing of these siNAs by Dicer will reveal new, active 5′ antisense ends. Therefore, the long siNAs can target the sites defined by the original 5′ ends and those defined by the new ends that are created by Dicer processing. When used in combination with traditional multifunctional siNAs (where the sense and antisense strands each define a target) the approach can be used for example to target 4 or more sites.

I. Tethered Bifunctional siNAs

[0661] The basic idea is a novel approach to the design of multifunctional siNAs in which two antisense siNA strands are annealed to a single sense strand. The sense strand oligonucleotide contains a linker (e.g., non-nulcoetide linker as described herein) and two segments that anneal to the antisense siNA strands (see FIG. 22). The linkers can also optionally comprise nucleotide-based linkers. Several potential advantages and variations to this approach include, but are not limited to:
[0662] 1. The two antisense siNAs are independent. Therefore, the choice of target sites is not constrained by a requirement for sequence conservation between two sites. Any two highly active siNAs can be combined to form a multifunctional siNA.
[0663] 2. When used in combination with target sites having homology, siNAs that target a sequence present in two genes (e.g., different isoforms), the design can be used to target more than two sites. A single multifunctional siNA can be for example, used to target RNA of two different target RNAs.
[0664] 3. Multifunctional siNAs that use both the sense and antisense strands to target a gene can also be incorporated into a tethered multifunctional design. This leaves open the possibility of targeting 6 or more sites with a single complex.
[0665] 4. It can be possible to anneal more than two antisense strand siNAs to a single tethered sense strand.
[0666] 5. The design avoids long continuous stretches of dsRNA. Therefore, it is less likely to initiate an interferon response.
[0667] 6. The linker (or modifications attached to it, such as conjugates described herein) can improve the pharmacokinetic properties of the complex or improve its incorporation into liposomes. Modifications introduced to the linker should not impact siNA activity to the same extent that they would if directly attached to the siNA (see for example FIGS. 27 and 28).
[0668] 7. The sense strand can extend beyond the annealed antisense strands to provide additional sites for the attachment of conjugates.
[0669] 8. The polarity of the complex can be switched such that both of the antisense 3′ ends are adjacent to the linker and the 5′ ends are distal to the linker or combination thereof.
   Dendrimer and Supramolecular siNAs

[0670] In the dendrimer siNA approach, the synthesis of siNA is initiated by first synthesizing the dendrimer template followed by attaching various functional siNAs. Various constructs are depicted in FIG. 23. The number of functional siNAs that can be attached is only limited by the dimensions of the dendrimer used.

Supramolecular Approach to Multifunctional siNA

[0671] The supramolecular format simplifies the challenges of dendrimer synthesis. In this format, the siNA strands are synthesized by standard RNA chemistry, followed by annealing of various complementary strands. The individual strand synthesis contains an antisense sense sequence of one siNA at the 5′-end followed by a nucleic acid or synthetic linker, such as hexaethyleneglyol, which in turn is followed by sense strand of another siNA in 5′ to 3′ direction. Thus, the synthesis of siNA strands can be carried out in a standard 3′ to 5′ direction. Representative examples of trifunctional and tetrafunctional siNAs are depicted in FIG. 24. Based on a similar principle, higher functionality siNA constucts can be designed as long as efficient annealing of various strands is achieved.

Dicer Enabled Multifunctional siNA

[0672] Using bioinformatic analysis of multiple targets, stretches of identical sequences shared between differeing target sequences can be identified ranging from about two to about fourteen nucleotides in length. These identical regions can be designed into extended siNA helixes (e.g., >30 base pairs) such that the processing by Dicer reveals a secondary functional 5′-antisense site (see for example FIG. 25). For example, when the first 17 nucleotides of a siNA antisense strand (e.g., 21 nucleotide strands in a duplex with 3′-TT overhangs) are complementary to a target RNA, robust silencing was observed at 25 nM. 80% silencing was observed with only 16 nucleotide complementarity in the same format.

[0673] Incorporation of this property into the designs of siNAs of about 30 to 40 or more base pairs results in additional multifunctional siNA constructs. The example in FIG. 25 illustrates how a 30 base-pair duplex can target three distinct sequences after processing by Dicer-RNaseIII; these sequences can be on the same mRNA or separate RNAs, such as viral and host factor messages, or multiple points along a given pathway (e.g., inflammatory cascades). Furthermore, a 40 base-pair duplex can combine a bifunctional design in tandem, to provide a single duplex targeting four target sequences. An even more extensive approach can include use of homologous sequences to enable five or six targets silenced for one multifunctional duplex. The example in FIG. 25 demonstrates how this can be achieved. A 30 base pair duplex is cleaved by Dicer into 22 and 8 base pair products from either end (8 b.p. fragments not shown). For ease of presentation the overhangs generated by dicer are not shown—but can be compensated for. Three targeting sequences are shown. The required sequence identity overlapped is indicated by grey boxes. The N's of the parent 30 b.p. siNA are suggested sites of 2′-OH positions to enable Dicer cleavage if this is tested in stabilized chemistries. Note that processing of a 30 mer duplex by Dicer RNase III does not give a precise 22+8 cleavage, but rather produces a series of closely related products (with 22+8 being the primary site). Therefore, processing by Dicer will yield a series of active siNAs. Another non-limiting example is shown in FIG. 26. A 40 base pair duplex is cleaved by Dicer into 20 base pair products from either end. For ease of presentation the overhangs generated by dicer are not shown—but can be compensated for. Four targeting sequences are shown in four colors, blue, light-blue and red and orange. The required sequence identity overlapped is indicated by grey boxes. This design format can be extended to larger RNAs. If chemically stabilized siNAs are bound by Dicer, then strategically located ribonucleotide linkages can enable designer cleavage products that permit our more extensive repertoire of multifunctional designs. For example cleavage products not limited to the Dicer standard of approximately 22-nucleotides can allow multifunctional siNA constructs with a target sequence identity overlap ranging from, for example, about 3 to about 15 nucleotides.

### Example 16

### Diagnostic Uses

[0674] The siNA molecules of the invention can be used in a variety of diagnostic applications, such as in the identification of molecular targets (e.g., RNA) in a variety of applications, for example, in clinical, industrial, environmental, agricultural and/or research settings. Such diagnostic use of siNA molecules involves utilizing reconstituted RNAi systems, for example, using cellular lysates or partially purified cellular lysates. siNA molecules of this invention can be used as diagnostic tools to examine genetic drift and mutations within diseased cells or to detect the presence of endogenous or exogenous, for example viral, RNA in a cell. The close relationship between siNA activity and the structure of the target RNA allows the detection of mutations in any region of the molecule, which alters the base-pairing and three-dimensional structure of the target RNA. By using multiple siNA molecules described in this invention, one can map nucleotide changes, which are important to RNA structure and function in vitro, as well as in cells and tissues. Cleavage of target RNAs with siNA molecules can be used to inhibit gene expression and define the role of specified gene products in the progression of disease or infection. In this manner, other genetic targets can be defined as important mediators of the disease. These experiments will lead to better treatment of the disease progression by affording the possibility of combination therapies (e.g., multiple siNA molecules targeted to different genes, siNA molecules coupled with known small molecule inhibitors, or intermittent treatment with combinations siNA molecules and/or other chemical or biological molecules). Other in vitro uses of siNA molecules of this invention are well known in the art, and include detection of the presence of mRNAs associated with a disease, infection, or related condition. Such RNA is detected by determining the presence of a cleavage product after treatment with a siNA using standard methodologies, for example, fluorescence resonance emission transfer (FRET).

[0675] In a specific example, siNA molecules that cleave only wild-type or mutant forms of the target RNA are used for the assay. The first siNA molecules (i.e., those that cleave only wild-type forms of target RNA) are used to identify wild-type RNA present in the sample and the second siNA molecules (i.e., those that cleave only mutant forms of target RNA) are used to identify mutant RNA in the sample. As reaction controls, synthetic substrates of both wild-type and mutant RNA are cleaved by both siNA molecules to demonstrate the relative siNA efficiencies in the reactions and the absence of cleavage of the “non-targeted” RNA species. The cleavage products from the synthetic substrates also serve to generate size markers for the analysis of wild-type and mutant RNAs in the sample population. Thus, each analysis requires two siNA molecules, two substrates and one unknown sample, which is combined into six reactions. The presence of cleavage products is determined using an RNase protection assay so that full-length and cleavage fragments of each RNA can be analyzed in one lane of a polyacrylamide gel. It is not absolutely required to quantify the results to gain insight into the expression of mutant RNAs and putative risk of the desired phenotypic changes in target cells. The expression of mRNA whose protein product is implicated in the development of the phenotype (i.e., disease related or infection related) is adequate to establish risk. If probes of comparable specific activity are used for both transcripts, then a qualitative comparison of RNA levels is adequate and decreases the cost of the initial diagnosis. Higher mutant form to wild-type ratios are correlated with higher risk whether RNA levels are compared qualitatively or quantitatively.

[0676] All patents and publications mentioned in the specification are indicative of the levels of skill of those skilled in the art to which the invention pertains. All references cited in this disclosure are incorporated by reference to the same extent as if each reference had been incorporated by reference in its entirety individually.

[0677] One skilled in the art would readily appreciate that the present invention is well adapted to carry out the objects and obtain the ends and advantages mentioned, as well as those inherent therein. The methods and compositions described herein as presently representative of preferred embodiments are exemplary and are not intended as limitations on the scope of the invention. Changes therein and other uses will occur to those skilled in the art, which are encompassed within the spirit of the invention, are defined by the scope of the claims.

[0678] It will be readily apparent to one skilled in the art that varying substitutions and modifications can be made to the invention disclosed herein without departing from the scope and spirit of the invention. Thus, such additional embodiments are within the scope of the present invention and the following claims. The present invention teaches one skilled in the art to test various combinations and/or substitutions of chemical modifications described herein toward generating nucleic acid constructs with improved activity for mediating RNAi activity. Such improved activity can comprise improved stability, improved bioavailability, and/or improved activation of cellular responses mediating RNAi. Therefore, the specific embodiments described herein are not limiting and one skilled in the art can readily appreciate that specific combinations of the modifications described herein can be tested without undue experimentation toward identifying siNA molecules with improved RNAi activity.

[0679] The invention illustratively described herein suitably can be practiced in the absence of any element or elements, limitation or limitations that are not specifically disclosed herein. Thus, for example, in each instance herein any of the terms “comprising”, “consisting essentially of”, and “consisting of” may be replaced with either of the other two terms. The terms and expressions which have been employed are used as terms of description and not of limitation, and there is no intention that in the use of such terms and expressions of excluding any equivalents of the features shown and described or portions thereof, but it is recognized that various modifications are possible within the scope of the invention claimed. Thus, it should be understood that although the present invention has been specifically disclosed by preferred embodiments, optional features, modification and variation of the concepts herein disclosed may be resorted to by those skilled in the art, and that such modifications and variations are considered to be within the scope of this invention as defined by the description and the appended claims.

[0680] In addition, where features or aspects of the invention are described in terms of Markush groups or other grouping of alternatives, those skilled in the art will recognize that the invention is also thereby described in terms of any individual member or subgroup of members of the Markush group or other group.

TABLE I
HCV Accession Numbers

| Seq Name | Acc# | LOCUS |
|---|---|---|
| gi\|329763\|gb\|M84754.1\|HPCGENANTI | M84754.1 | HPCGENANTI |
| gi\|567059\|gb\|U16362.1\|HCU16362 | U16362.1 | HCU16362 |
| gi\|5918956\|gb\|AF165059.1\|AF165059 | AF165059.1 | AF165059 |
| gi\|385583\|gb\|S62220.1\|S62220 | S62220.1 | S62220 |
| gi\|6010587\|gb\|AF177040.1\|AF177040 | AF177040.1 | AF177040 |
| gi\|5748510\|emb\|AJ238800.1\|HCJ238800 | AJ238800.1 | HCJ238800 |
| gi\|7650221\|gb\|AF207752.1\|AF207752 | AF207752.1 | AF207752 |
| gi\|11559454\|dbj\|AB049094.1\|AB049094 | AB049094.1 | AB049094 |
| gi\|3550760\|dbj\|D84263.1\|D84263 | D84263.1 | D84263 |
| gi\|221610\|dbj\|D90208.1\|HPCJCG | D90208.1 | HPCJCG |
| gi\|558520\|dbj\|D28917.1\|HPCK3A | D28917.1 | HPCK3A |
| gi\|2176577\|dbj\|E08461.1\|E08461 | E08461.1 | E08461 |
| gi\|6707285\|gb\|AF169005.1\|AF169005 | AF169005.1 | AF169005 |
| gi\|12309923\|emb\|AX057094.1\|AX057094 | AX057094.1 | AX057094 |
| gi\|6010585\|gb\|AF177039.1\|AF177039 | AF177039.1 | AF177039 |
| gi\|7329202\|gb\|AF238482.1\|AF238482 | AF238482.1 | AF238482 |
| gi\|11559464\|dbj\|AB049099.1\|AB049099 | AB049099.1 | AB049099 |
| gi\|5918932\|gb\|AF165047.1\|AF165047 | AF165047.1 | AF165047 |
| gi\|5918946\|gb\|AF165054.1\|AF165054 | AF165054.1 | AF165054 |
| gi\|7650233\|gb\|AF207758.1\|AF207758 | AF207758.1 | AF207758 |
| gi\|19568932\|gb\|AF483269.1\| | AF483269.1 | |
| gi\|7650247\|gb\|AF207765.1\|AF207765 | AF207765.1 | AF207765 |
| gi\|12309919\|emb\|AX057086.1\|AX057086 | AX057086.1 | AX057086 |
| gi\|5708597\|dbj\|E10839.1\|E10839 | E10839.1 | E10839 |
| gi\|2327074\|gb\|AF011753.1\|AF011753 | AF011753.1 | AF011753 |
| gi\|12310062\|emb\|AX057317.1\|AX057317 | AX057317.1 | AX057317 |
| gi\|221606\|dbj\|D10750.1\|HPCJ491 | D10750.1 | HPCJ491 |
| gi\|2174448\|dbj\|E06261.1\|E06261 | E06261.1 | E06261 |
| gi\|3098640\|gb\|AF054251.1\|AF054251 | AF054251.1 | AF054251 |
| gi\|18027684\|gb\|AF313916.1\|AF313916 | AF313916.1 | AF313916 |
| gi\|329873\|gb\|M62321.1\|HPCPLYPRE | M62321.1 | HPCPLYPRE |
| gi\|464177\|dbj\|D14853.1\|HPCCGS | D14853.1 | HPCCGS |
| gi\|15422182\|gb\|AY051292.1\| | AY051292.1 | |
| gi\|676877\|dbj\|D49374.1\|HPCFG | D49374.1 | HPCFG |
| gi\|1030706\|dbj\|D50480.1\|HPCK1R1 | D50480.1 | HPCK1R1 |
| gi\|7650223\|gb\|AF207753.1\|AF207753 | AF207753.1 | AF207753 |
| gi\|7650237\|gb\|AF207760.1\|AF207760 | AF207760.1 | AF207760 |
| gi\|11559444\|dbj\|AB049089.1\|AB049089 | AB049089.1 | AB049089 |
| gi\|3550762\|dbj\|D84264.1\|D84264 | D84264.1 | D84264 |
| gi\|12831192\|gb\|AF333324.1\|AF333324 | AF333324.1 | AF333324 |
| gi\|13122265\|dbj\|AB047641.1\|AB047641 | AB047641.1 | AB047641 |
| gi\|7329204\|gb\|AF238483.1\|AF238483 | AF238483.1 | AF238483 |
| gi\|11559468\|dbj\|AB049101.1\|AB049101 | AB049101.1 | AB049101 |
| gi\|5918934\|gb\|AF165048.1\|AF165048 | AF165048.1 | AF165048 |
| gi\|5918948\|gb\|AF165055.1\|AF165055 | AF165055.1 | AF165055 |
| gi\|7650235\|gb\|AF207759.1\|AF207759 | AF207759.1 | AF207759 |
| gi\|7650249\|gb\|AF207766.1\|AF207766 | AF207766.1 | AF207766 |
| gi\|9843676\|emb\|AJ278830.1\|HEC278830 | AJ278830.1 | HEC278830 |
| gi\|11559450\|dbj\|AB049092.1\|AB049092 | AB049092.1 | AB049092 |
| gi\|2943783\|dbj\|D89815.1\|D89815 | D89815.1 | D89815 |
| gi\|9626438\|ref\|NC_001433.1\| | NC_{—} | |
| | 001433.1 | |
| gi\|12310134\|emb\|AX057395.1\|AX057395 | AX057395.1 | AX057395 |
| gi\|11559460\|dbj\|AB049097.1\|AB049097 | AB049097.1 | AB049097 |
| gi\|12309922\|emb\|AX057092.1\|AX057092 | AX057092.1 | AX057092 |
| gi\|2174644\|dbj\|E06457.1\|E06457 | E06457.1 | E06457 |
| gi\|2176559\|dbj\|E08443.1\|E08443 | E08443.1 | E08443 |
| gi\|5918960\|gb\|AF165061.1\|AF165061 | AF165061.1 | AF165061 |
| gi\|2326454\|emb\|Y12083.1\|HCV12083 | Y12083.1 | HCV12083 |
| gi\|5918938\|gb\|AF165050.1\|AF165050 | AF165050.1 | AF165050 |
| gi\|7650225\|gb\|AF207754.1\|AF207754 | AF207754.1 | AF207754 |
| gi\|7650261\|gb\|AF207772.1\|AF207772 | AF207772.1 | AF207772 |
| gi\|1030704\|dbj\|D50485.1\|HPCK1S2 | D50485.1 | HPCK1S2 |
| gi\|3550758\|dbj\|D84262.1\|D84262 | D84262.1 | D84262 |
| gi\|7650239\|gb\|AF207761.1\|AF207761 | AF207761.1 | AF207761 |
| gi\|3550764\|dbj\|D84265.1\|D84265 | D84265.1 | D84265 |
| gi\|7329206\|gb\|AF238484.1\|AF238484 | AF238484.1 | AF238484 |
| gi\|2176516\|dbj\|E08399.1\|E08399 | E08399.1 | E08399 |
| gi\|5918936\|gb\|AF165049.1\|AF165049 | AF165049.1 | AF165049 |
| gi\|11559446\|dbj\|AB049090.1\|AB049090 | AB049090.1 | AB049090 |
| gi\|5441837\|emb\|AJ242653.1\|SSE242653 | AJ242653.1 | SSE242653 |
| gi\|3098641\|gb\|AF054252.1\|AF054252 | AF054252.1 | AF054252 |
| gi\|4753720\|emb\|AJ132997.1\|HCV132997 | AJ132997.1 | HCV132997 |
| gi\|5420376\|emb\|AJ238799.1\|HCJ238799 | AJ238799.1 | HCJ238799 |
| gi\|11559440\|dbj\|AB049087.1\|AB049087 | AB049087.1 | AB049087 |
| gi\|15529110\|gb\|AY045702.1\| | AY045702.1 | |
| gi\|560788\|dbj\|D30613.1\|HPCPP | D30613.1 | HPCPP |
| gi\|11225869\|emb\|AX036253.1\|AX036253 | AX036253.1 | AX036253 |
| gi\|11559456\|dbj\|AB049095.1\|AB049095 | AB049095.1 | AB049095 |
| gi\|329770\|gb\|M58335.1\|HPCHUMR | M58335.1 | HPCHUMR |
| gi\|6707279\|gb\|AF169002.1\|AF169002 | AF169002.1 | AF169002 |
| gi\|221586\|dbj\|D10749.1\|HPCHCJ1 | D10749.1 | HPCHCJ1 |
| gi\|2171981\|dbj\|E03766.1\|E03766 | E03766.1 | E03766 |
| gi\|6010579\|gb\|AF177036.1\|AF177036 | AF177036.1 | AF177036 |
| gi\|1030703\|dbj\|D50484.1\|HPCK1S3 | D50484.1 | HPCK1S3 |
| gi\|3098650\|gb\|AF054257.1\|AF054257 | AF054257.1 | AF054257 |
| gi\|5821154\|dbj\|AB016785.1\|AB016785 | AB016785.1 | AB016785 |
| gi\|5918962\|gb\|AF165062.1\|AF165062 | AF165062.1 | AF165062 |
| gi\|7650227\|gb\|AF207755.1\|AF207755 | AF207755.1 | AF207755 |
| gi\|7650263\|gb\|AF207773.1\|AF207773 | AF207773.1 | AF207773 |
| gi\|1183030\|dbj\|D63822.1\|HPCJK046E2 | D63822.1 | HPCJK046E2 |
| gi\|13122271\|dbj\|AB047644.1\|AB047644 | AB047644.1 | AB047644 |
| gi\|2443428\|gb\|U89019.1\|HCU89019 | U89019.1 | HCU89019 |
| gi\|2462303\|emb\|Y13184.1\|HCV1480 | Y13184.1 | HCV1480 |
| gi\|7329208\|gb\|AF238485.1\|AF238485 | AF238485.1 | AF238485 |
| gi\|1160327\|dbj\|D14484.1\|HPCJRNA | D14484.1 | HPCJRNA |
| gi\|12309921\|emb\|AX057090.1\|AX057090 | AX057090.1 | AX057090 |
| gi\|3098643\|gb\|AF054253.1\|AF054253 | AF054253.1 | AF054253 |
| gi\|21397075\|gb\|AF511948.1\| | AF511948.1 | |
| gi\|1030701\|dbj\|D50482.1\|HPCK1R3 | D50482.1 | HPCK1R3 |
| gi\|1030702\|dbj\|D50483.1\|HPCK1S1 | D50483.1 | HPCK1S1 |
| gi\|3098632\|gb\|AF054247.1\|AF054247 | AF054247.1 | AF054247 |
| gi\|59478\|emb\|X61596.1\|HCVJK1G | X61596.1 | HCVJK1G |
| gi\|3098652\|gb\|AF054258.1\|AF054258 | AF054258.1 | AF054258 |
| gi\|5918950\|gb\|AF165056.1\|AF165056 | AF165056.1 | AF165056 |
| gi\|7650251\|gb\|AF207767.1\|AF207767 | AF207767.1 | AF207767 |
| gi\|5918964\|gb\|AF165063.1\|AF165063 | AF165063.1 | AF165063 |
| gi\|5918928\|gb\|AF165045.1\|AF165045 | AF165045.1 | AF165045 |
| gi\|5532421\|gb\|AF139594.1\|AF139594 | AF139594.1 | AF139594 |
| gi\|13122267\|dbj\|AB047642.1\|AB047642 | AB047642.1 | AB047642 |
| gi\|5441831\|emb\|AJ242651.1\|SSE242651 | AJ242651.1 | SSE242651 |
| gi\|7650265\|gb\|AF207774.1\|AF207774 | AF207774.1 | AF207774 |
| gi\|7650229\|gb\|AF207756.1\|AF207756 | AF207756.1 | AF207756 |
| gi\|1183032\|dbj\|D63821.1\|HPCJK049E1 | D63821.1 | HPCJK049E1 |
| gi\|2175714\|dbj\|E07579.1\|E07579 | E07579.1 | E07579 |
| gi\|1212741\|dbj\|D45172.1\|HPCHCPO | D45172.1 | HPCHCPO |
| gi\|5708511\|dbj\|E05027.1\|E05027 | E05027.1 | E05027 |
| gi\|1483141\|dbj\|D50409.1\|D50409 | D50409.1 | D50409 |
| gi\|13122261\|dbj\|AB047639.1\|AB047639 | AB047639.1 | AB047639 |
| gi\|6521008\|dbj\|AB031663.1\|AB031663 | AB031663.1 | AB031663 |
| gi\|633201\|emb\|X76918.1\|HCVCENS1 | X76918.1 | HCVCENS1 |
| gi\|329737\|gb\|M67463.1\|HPCCGAA | M67463.1 | HPCCGAA |
| gi\|11559452\|dbj\|AB049093.1\|AB049093 | AB049093.1 | AB049093 |
| gi\|13619567\|emb\|AX100563.1\|AX100563 | AX100563.1 | AX100563 |
| gi\|221604\|dbj\|D13558.1\|HPCJ483 | D13558.1 | HPCJ483 |
| gi\|11225872\|emb\|AX036256.1\|AX036256 | AX036256.1 | AX036256 |
| gi\|1749761\|dbj\|D89872.1\|D89872 | D89872.1 | D89872 |
| gi\|5918940\|gb\|AF165051.1\|AF165051 | AF165051.1 | AF165051 |
| gi\|4753718\|emb\|AJ132996.1\|HCV132996 | AJ132996.1 | HCV132996 |
| gi\|7650241\|gb\|AF207762.1\|AF207762 | AF207762.1 | AF207762 |
| gi\|3098645\|gb\|AF054254.1\|AF054254 | AF054254.1 | AF054254 |
| gi\|9930556\|gb\|AF290978.1\|AF290978 | AF290978.1 | AF290978 |
| gi\|11559462\|dbj\|AB049098.1\|AB049098 | AB049098.1 | AB049098 |
| gi\|2764397\|emb\|AJ000009.1\|HCVPOLYP | AJ000009.1 | HCVPOLYP |
| gi\|221608\|dbj\|D10988.1\|HPCJ8G | D10988.1 | HPCJ8G |
| gi\|3098634\|gb\|AF054248.1\|AF054248 | AF054248.1 | AF054248 |
| gi\|221650\|dbj\|D00944.1\|HPCPOLP | D00944.1 | HPCPOLP |
| gi\|306286\|gb\|M96362.1\|HPCUNKCDS | M96362.1 | HPCUNKCDS |
| gi\|3098654\|gb\|AF054259.1\|AF054259 | AF054259.1 | AF054259 |
| gi\|5918952\|gb\|AF165057.1\|AF165057 | AF165057.1 | AF165057 |
| gi\|7650253\|gb\|AF207768.1\|AF207768 | AF207768.1 | AF207768 |
| gi\|5918966\|gb\|AF165064.1\|AF165064 | AF165064.1 | AF165064 |
| gi\|15487693\|gb\|AF356827.1\|AF356827 | AF356827.1 | AF356827 |
| gi\|5738246\|gb\|AF176573.1\|AF176573 | AF176573.1 | AF176573 |
| gi\|11559448\|dbj\|AB049091.1\|AB049091 | AB049091.1 | AB049091 |
| gi\|21397077\|gb\|AF511950.1\| | AF511950.1 | |
| gi\|3098638\|gb\|AF054250.1\|AF054250 | AF054250.1 | AF054250 |
| gi\|6707281\|gb\|AF169003.1\|AF169003 | AF169003.1 | AF169003 |
| gi\|329739\|gb\|L02836.1\|HPCCGENOM | L02836.1 | HPCCGENOM |
| gi\|6010581\|gb\|AF177037.1\|AF177037 | AF177037.1 | AF177037 |
| gi\|11559442\|dbj\|AB049088.1\|AB049088 | AB049088.1 | AB049088 |
| gi\|21397076\|gb\|AF511949.1\| | AF511949.1 | |
| gi\|1030705\|dbj\|D50481.1\|HPCK1R2 | D50481.1 | HPCK1R2 |
| gi\|2176384\|dbj\|E08264.1\|E08264 | E08264.1 | E08264 |
| gi\|3660725\|gb\|AF064490.1\|AF064490 | AF064490.1 | AF064490 |
| gi\|2252489\|emb\|Y11604.1\|HCV4APOLY | Y11604.1 | HCV4APOLY |
| gi\|5918942\|gb\|AF165052.1\|AF165052 | AF165052.1 | AF165052 |
| gi\|2895898\|gb\|AF046866.1\|AF046866 | AF046866.1 | AF046866 |
| gi\|7650243\|gb\|AF207763.1\|AF207763 | AF207763.1 | AF207763 |
| gi\|11559458\|dbj\|AB049096.1\|AB049096 | AB049096.1 | AB049096 |
| gi\|13122263\|dbj\|AB047640.1\|AB047640 | AB047640.1 | AB047640 |
| gi\|5708574\|dbj\|E08263.1\|E08263 | E08263.1 | E08263 |
| gi\|7650257\|gb\|AF207770.1\|AF207770 | AF207770.1 | AF207770 |
| gi\|3098647\|gb\|AF054255.1\|AF054255 | AF054255.1 | AF054255 |
| gi\|11559466\|dbj\|AB049100.1\|AB049100 | AB049100.1 | AB049100 |
| gi\|1181831\|gb\|U45476.1\|HCU45476 | U45476.1 | HCU45476 |
| gi\|2327070\|gb\|AF011751.1\|AF011751 | AF011751.1 | AF011751 |
| gi\|3098636\|gb\|AF054249.1\|AF054249 | AF054249.1 | AF054249 |
| gi\|7329210\|gb\|AF238486.1\|AF238486 | AF238486.1 | AF238486 |
| gi\|221612\|dbj\|D11168.1\|HPCJTA | D11168.1 | HPCJTA |
| gi\|960359\|dbj\|D63857.1\|HPVHCVN | D63857.1 | HPVHCVN |
| gi\|13122273\|dbj\|AB047645.1\|AB047645 | AB047645.1 | AB047645 |
| gi\|5918954\|gb\|AF165058.1\|AF165058 | AF165058.1 | AF165058 |
| gi\|7650255\|gb\|AF207769.1\|AF207769 | AF207769.1 | AF207769 |
| gi\|437107\|gb\|U01214.1\|HCU01214 | U01214.1 | HCU01214 |
| gi\|471116\|dbj\|D10934.1\|HPCRNA | D10934.1 | HPCRNA |
| gi\|13026028\|dbj\|E66593.1\|E66593 | E66593.1 | E66593 |
| gi\|2316097\|gb\|AF009606.1\|AF009606 | AF009606.1 | AF009606 |
| gi\|6707283\|gb\|AF169004.1\|AF169004 | AF169004.1 | AF169004 |
| gi\|514395\|dbj\|D17763.1\|HPCEGS | D17763.1 | HPCEGS |
| gi\|9757541\|dbj\|AB030907.1\|AB030907 | AB030907.1 | AB030907 |
| gi\|7329200\|gb\|AF238481.1\|AF238481 | AF238481.1 | AF238481 |
| gi\|6010583\|gb\|AF177038.1\|AF177038 | AF177038.1 | AF177038 |
| gi\|2172621\|dbj\|E04420.1\|E04420 | E04420.1 | E04420 |
| gi\|8926244\|gb\|AF271632.1\|AF271632 | AF271632.1 | AF271632 |
| gi\|5918930\|gb\|AF165046.1\|AF165046 | AF165046.1 | AF165046 |
| gi\|7650231\|gb\|AF207757.1\|AF207757 | AF207757.1 | AF207757 |
| gi\|5918944\|gb\|AF165053.1\|AF165053 | AF165053.1 | AF165053 |
| gi\|7650245\|gb\|AF207764.1\|AF207764 | AF207764.1 | AF207764 |
| gi\|12309920\|emb\|AX057088.1\|AX057088 | AX057088.1 | AX057088 |
| gi\|5918958\|gb\|AF165060.1\|AF165060 | AF165060.1 | AF165060 |
| gi\|7650259\|gb\|AF207771.1\|AF207771 | AF207771.1 | AF207771 |
| gi\|7341102\|gb\|AF208024.1\|AF208024 | AF208024.1 | AF208024 |
| gi\|3098649\|gb\|AF054256.1\|AF054256 | AF054256.1 | AF054256 |
| gi\|1944375\|dbj\|D85516.1\|D85516 | D85516.1 | D85516 |
| gi\|2327072\|gb\|AF011752.1\|AF011752 | AF011752.1 | AF011752 |
| gi\|221614\|dbj\|D11355.1\|HPCJTB | D11355.1 | HPCJTB |
| gi\|13122269\|dbj\|AB047643.1\|AB047643 | AB047643.1 | AB047643 |

[0681] TABLE II

HCV siNA AND TARGET SEQUENCES

| | | | | | |
|---|---|---|---|---|---|
| | Seq | | Seq | | Seq |
| Sequence | ID | Upper seq | ID | Lower seq | ID |

| | | | | | |
|---|---|---|---|---|---|
| GCCCCGGGAGGUCUCGUAG | 1 | GCCCCGGGAGGUCUCGUAG | 1 | CUACGAGACCUCCCGGGGC | 697 |
| UGUGGUACUGCCUGAUAGG | 2 | UGUGGUACUGCCUGAUAGG | 2 | CCUAUCAGGCAGUACCACA | 698 |
| UUGUGGUACUGCCUGAUAG | 3 | UUGUGGUACUGCCUGAUAG | 3 | CUAUCAGGCAGUACCACAA | 699 |
| CCCCGGGAGGUCUCGUAGA | 4 | CCCCGGGAGGUCUCGUAGA | 4 | UCUACGAGACCUCCCGGGG | 700 |
| GUGGUACUGCCUGAUAGGG | 5 | GUGGUACUGCCUGAUAGGG | 5 | CCCUAUCAGGCAGUACCAC | 701 |
| CUGCCUGAUAGGGUGCUUG | 6 | CUGCCUGAUAGGGUGCUUG | 6 | CAAGCACCCUAUCAGGCAG | 702 |
| CCUUGUGGUACUGCCUGAU | 7 | CCUUGUGGUACUGCCUGAU | 7 | AUCAGGCAGUACCACAAGG | 703 |
| GCGAAAGGCCUUGUGGUAC | 8 | GCGAAAGGCCUUGUGGUAC | 8 | GUACCACAAGGCCUUUCGC | 704 |
| UACUGCCUGAUAGGGUGCU | 9 | UACUGCCUGAUAGGGUGCU | 9 | AGCACCCUAUCAGGCAGUA | 705 |
| GGUACUGCCUGAUAGGGUG | 10 | GGUACUGCCUGAUAGGGUG | 10 | CACCCUAUCAGGCAGUACC | 706 |
| AAAGGCCUUGUGGUACUGC | 11 | AAAGGCCUUGUGGUACUGC | 11 | GCAGUACCACAAGGCCUUU | 707 |
| AAGGCCUUGUGGUACUGCC | 12 | AAGGCCUUGUGGUACUGCC | 12 | GGCAGUACCACAAGGCCUU | 708 |
| CUUGUGGUACUGCCUGAUA | 13 | CUUGUGGUACUGCCUGAUA | 13 | UAUCAGGCAGUACCACAAG | 709 |
| AGGCCUUGUGGUACUGCCU | 14 | AGGCCUUGUGGUACUGCCU | 14 | AGGCAGUACCACAAGGCCU | 710 |
| GUACUGCCUGAUAGGGUGC | 15 | GUACUGCCUGAUAGGGUGC | 15 | GCACCCUAUCAGGCAGUAC | 711 |
| ACUGCCUGAUAGGGUGCUU | 16 | ACUGCCUGAUAGGGUGCUU | 16 | AAGCACCCUAUCAGGCAGU | 712 |
| CUUGCGAGUGCCCCGGGAG | 17 | CUUGCGAGUGCCCCGGGAG | 17 | CUCCCGGGGCACUCGCAAG | 713 |
| CUGAUAGGGUGCUUGCGAG | 18 | CUGAUAGGGUGCUUGCGAG | 18 | CUCGCAAGCACCCUAUCAG | 714 |
| UUGCGAGUGCCCCGGGAGG | 19 | UUGCGAGUGCCCCGGGAGG | 19 | CCUCCCGGGGCACUCGCAA | 715 |
| CCUGAUAGGGUGCUUGCGA | 20 | CCUGAUAGGGUGCUUGCGA | 20 | UCGCAAGCACCCUAUCAGG | 716 |
| GGCCUUGUGGUACUGCCUG | 21 | GGCCUUGUGGUACUGCCUG | 21 | CAGGCAGUACCACAAGGCC | 717 |
| GCUUGCGAGUGCCCCGGGA | 22 | GCUUGCGAGUGCCCCGGGA | 22 | UCCCGGGGCACUCGCAAGC | 718 |
| UGCCUGAUAGGGUGCUUGC | 23 | UGCCUGAUAGGGUGCUUGC | 23 | GCAAGCACCCUAUCAGGCA | 719 |
| GAAAGGCCUUGUGGUACUG | 24 | GAAAGGCCUUGUGGUACUG | 24 | CAGUACCACAAGGCCUUUC | 720 |
| GCCUGAUAGGGUGCUUGCG | 25 | GCCUGAUAGGGUGCUUGCG | 25 | CGCAAGCACCCUAUCAGGC | 721 |
| CGAAAGGCCUUGUGGUACU | 26 | CGAAAGGCCUUGUGGUACU | 26 | AGUACCACAAGGCCUUUCG | 722 |
| GCCUUGUGGUACUGCCUGA | 27 | GCCUUGUGGUACUGCCUGA | 27 | UCAGGCAGUACCACAAGGC | 723 |
| GAGUGCCCCGGGAGGUCUC | 28 | GAGUGCCCCGGGAGGUCUC | 28 | GAGACCUCCCGGGGCACUC | 724 |
| CCCGGGAGGUCUCGUAGAC | 29 | CCCGGGAGGUCUCGUAGAC | 29 | GUCUACGAGACCUCCCGGG | 725 |
| UGCGAGUGCCCCGGGAGGU | 30 | UGCGAGUGCCCCGGGAGGU | 30 | ACCUCCCGGGGCACUCGCA | 726 |
| UGGUACUGCCUGAUAGGGU | 31 | UGGUACUGCCUGAUAGGGU | 31 | ACCCUAUCAGGCAGUACCA | 727 |
| CCGGUGAGUACACCGGAAU | 32 | CCGGUGAGUACACCGGAAU | 32 | AUUCCGGUGUACUCACCGG | 728 |
| GCGAGUGCCCCGGGAGGUC | 33 | GCGAGUGCCCCGGGAGGUC | 33 | GACCUCCCGGGGCACUCGC | 729 |
| CGAGUGCCCCGGGAGGUCU | 34 | CGAGUGCCCCGGGAGGUCU | 34 | AGACCUCCCGGGGCACUCG | 730 |
| UGCCCCGGGAGGUCUCGUA | 35 | UGCCCCGGGAGGUCUCGUA | 35 | UACGAGACCUCCCGGGGCA | 731 |
| GUGCCCCGGGAGGUCUCGU | 36 | GUGCCCCGGGAGGUCUCGU | 36 | ACGAGACCUCCCGGGGCAC | 732 |
| AGUGCCCCGGGAGGUCUCG | 37 | AGUGCCCCGGGAGGUCUCG | 37 | CGAGACCUCCCGGGGCACU | 733 |
| CCGGGAGGUCUCGUAGACC | 38 | CCGGGAGGUCUCGUAGACC | 38 | GGUCUACGAGACCUCCCGG | 734 |
| UGAUAGGGUGCUUGCGAGU | 39 | UGAUAGGGUGCUUGCGAGU | 39 | ACUCGCAAGCACCCUAUCA | 735 |
| GUGCUUGCGAGUGCCCCGG | 40 | GUGCUUGCGAGUGCCCCGG | 40 | CCGGGGCACUCGCAAGCAC | 736 |
| AUAGGGUGCUUGCGAGUGC | 41 | AUAGGGUGCUUGCGAGUGC | 41 | GCACUCGCAAGCACCCUAU | 737 |
| GGGUGCUUGCGAGUGCCCC | 42 | GGGUGCUUGCGAGUGCCCC | 42 | GGGGCACUCGCAAGCACCC | 738 |
| CGGGAGGUCUCGUAGACCG | 43 | CGGGAGGUCUCGUAGACCG | 43 | CGGUCUACGAGACCUCCCG | 739 |
| GGGAGGUCUCGUAGACCGU | 44 | GGGAGGUCUCGUAGACCGU | 44 | ACGGUCUACGAGACCUCCC | 740 |
| GAUAGGGUGCUUGCGAGUG | 45 | GAUAGGGUGCUUGCGAGUG | 45 | CACUCGCAAGCACCCUAUC | 741 |
| GGAGGUCUCGUAGACCGUG | 46 | GGAGGUCUCGUAGACCGUG | 46 | CACGGUCUACGAGACCUCC | 742 |
| AGGGUGCUUGCGAGUGCCC | 47 | AGGGUGCUUGCGAGUGCCC | 47 | GGGCACUCGCAAGCACCCU | 743 |
| UGCUUGCGAGUGCCCCGGG | 48 | UGCUUGCGAGUGCCCCGGG | 48 | CCCGGGGCACUCGCAAGCA | 744 |
| GGUGCUUGCGAGUGCCCCG | 49 | GGUGCUUGCGAGUGCCCCG | 49 | CGGGGCACUCGCAAGCACC | 745 |
| UAGGGUGCUUGCGAGUGCC | 50 | UAGGGUGCUUGCGAGUGCC | 50 | GGCACUCGCAAGCACCCUA | 746 |
| AGGUCUCGUAGACCGUGCA | 51 | AGGUCUCGUAGACCGUGCA | 51 | UGCACGGUCUACGAGACCU | 747 |
| GAGGUCUCGUAGACCGUGC | 52 | GAGGUCUCGUAGACCGUGC | 52 | GCACGGUCUACGAGACCUC | 748 |
| GGAACCGGUGAGUACACCG | 53 | GGAACCGGUGAGUACACCG | 53 | CGGUGUACUCACCGGUUCC | 749 |
| CGGAACCGGUGAGUACACC | 54 | CGGAACCGGUGAGUACACC | 54 | GGUGUACUCACCGGUUCCG | 750 |
| CGGUGAGUACACCGGAAUU | 55 | CGGUGAGUACACCGGAAUU | 55 | AAUUCCGGUGUACUCACCG | 751 |
| GCGGAACCGGUGAGUACAC | 56 | GCGGAACCGGUGAGUACAC | 56 | GUGUACUCACCGGUUCCGC | 752 |
| AACCGGUGAGUACACCGGA | 57 | AACCGGUGAGUACACCGGA | 57 | UCCGGUGUACUCACCGGUU | 753 |
| ACCGGUGAGUACACCGGAA | 58 | ACCGGUGAGUACACCGGAA | 58 | UUCCGGUGUACUCACCGGU | 754 |
| CUGCGGAACCGGUGAGUAC | 59 | CUGCGGAACCGGUGAGUAC | 59 | GUACUCACCGGUUCCGCAG | 755 |
| GUCUGCGGAACCGGUGAGU | 60 | GUCUGCGGAACCGGUGAGU | 60 | ACUCACCGGUUCCGCAGAC | 756 |
| GAACCGGUGAGUACACCGG | 61 | GAACCGGUGAGUACACCGG | 61 | CCGGUGUACUCACCGGUUC | 757 |
| UGCGGAACCGGUGAGUACA | 62 | UGCGGAACCGGUGAGUACA | 62 | UGUACUCACCGGUUCCGCA | 758 |
| UCUGCGGAACCGGUGAGUA | 63 | UCUGCGGAACCGGUGAGUA | 63 | UACUCACCGGUUCCGCAGA | 759 |
| GGGAGAGCCAUAGUGGUCU | 64 | GGGAGAGCCAUAGUGGUCU | 64 | AGACCACUAUGGCUCUCCC | 760 |
| GUGGUCUGCGGAACCGGUG | 65 | GUGGUCUGCGGAACCGGUG | 65 | CACCGGUUCCGCAGACCAC | 761 |
| GGUCUGCGGAACCGGUGAG | 66 | GGUCUGCGGAACCGGUGAG | 66 | CUCACCGGUUCCGCAGACC | 762 |
| CGGGAGAGCCAUAGUGGUC | 67 | CGGGAGAGCCAUAGUGGUC | 67 | GACCACUAUGGCUCUCCCG | 763 |
| CCGGGAGAGCCAUAGUGGU | 68 | CCGGGAGAGCCAUAGUGGU | 68 | ACCACUAUGGCUCUCCCGG | 764 |
| UGGUCUGCGGAACCGGUGA | 69 | UGGUCUGCGGAACCGGUGA | 69 | UCACCGGUUCCGCAGACCA | 765 |
| GUGAGUACACCGGAAUUGC | 70 | GUGAGUACACCGGAAUUGC | 70 | GCAAUUCCGGUGUACUCAC | 766 |
| UGAGUACACCGGAAUUGCC | 71 | UGAGUACACCGGAAUUGCC | 71 | GGCAAUUCCGGUGUACUCA | 767 |
| GGUGAGUACACCGGAAUUG | 72 | GGUGAGUACACCGGAAUUG | 72 | CAAUUCCGGUGUACUCACC | 768 |
| GAGCCAUAGUGGUCUGCGG | 73 | GAGCCAUAGUGGUCUGCGG | 73 | CCGCAGACCACUAUGGCUC | 769 |
| AGAGCCAUAGUGGUCUGCG | 74 | AGAGCCAUAGUGGUCUGCG | 74 | CGCAGACCACUAUGGCUCU | 770 |
| UAGUGGUCUGCGGAACCGG | 75 | UAGUGGUCUGCGGAACCGG | 75 | CCGGUUCCGCAGACCACUA | 771 |
| AUAGUGGUCUGCGGAACCG | 76 | AUAGUGGUCUGCGGAACCG | 76 | CGGUUCCGCAGACCACUAU | 772 |
| GAGAGCCAUAGUGGUCUGC | 77 | GAGAGCCAUAGUGGUCUGC | 77 | GCAGACCACUAUGGCUCUC | 773 |
| GCCAUAGUGGUCUGCGGAA | 78 | GCCAUAGUGGUCUGCGGAA | 78 | UUCCGCAGACCACUAUGGC | 774 |
| AGUGGUCUGCGGAACCGGU | 79 | AGUGGUCUGCGGAACCGGU | 79 | ACCGGUUCCGCAGACCACU | 775 |
| CAUAGUGGUCUGCGGAACC | 80 | CAUAGUGGUCUGCGGAACC | 80 | GGUUCCGCAGACCACUAUG | 776 |
| AGCCAUAGUGGUCUGCGGA | 81 | AGCCAUAGUGGUCUGCGGA | 81 | UCCGCAGACCACUAUGGCU | 777 |
| CCAUAGUGGUCUGCGGAAC | 82 | CCAUAGUGGUCUGCGGAAC | 82 | GUUCCGCAGACCACUAUGG | 778 |
| CCCCUCCCGGGAGAGCCAU | 83 | CCCCUCCCGGGAGAGCCAU | 83 | AUGGCUCUCCCGGGAGGGG | 779 |
| GGAGAGCCAUAGUGGUCUG | 84 | GGAGAGCCAUAGUGGUCUG | 84 | CAGACCACUAUGGCUCUCC | 780 |
| CCCGGGAGAGCCAUAGUGG | 85 | CCCGGGAGAGCCAUAGUGG | 85 | CCACUAUGGCUCUCCCGGG | 781 |
| CCCCCUCCCGGGAGAGCCA | 86 | CCCCCUCCCGGGAGAGCCA | 86 | UGGCUCUCCCGGGAGGGGG | 782 |
| UCCCGGGAGAGCCAUAGUG | 87 | UCCCGGGAGAGCCAUAGUG | 87 | CACUAUGGCUCUCCCGGGA | 783 |
| CCCCCCUCCCGGGAGAGCC | 88 | CCCCCCUCCCGGGAGAGCC | 88 | GGCUCUCCCGGGAGGGGGG | 784 |
| CCCUCCCGGGAGAGCCAUA | 89 | CCCUCCCGGGAGAGCCAUA | 89 | UAUGGCUCUCCCGGGAGGG | 785 |
| CCUCCCGGGAGAGCCAUAG | 90 | CCUCCCGGGAGAGCCAUAG | 90 | CUAUGGCUCUCCCGGGAGG | 786 |
| CUCCCGGGAGAGCCAUAGU | 91 | CUCCCGGGAGAGCCAUAGU | 91 | ACUAUGGCUCUCCCGGGAG | 787 |
| UGUUGCCGCGCAGGGGCCC | 92 | UGUUGCCGCGCAGGGGCCC | 92 | GGGCCCCUGCGCGGCAACA | 788 |
| CCCCCCCUCCCGGGAGAGC | 93 | CCCCCCCUCCCGGGAGAGC | 93 | GCUCUCCCGGGAGGGGGGG | 789 |
| CAUGGCGUUAGUAUGAGUG | 94 | CAUGGCGUUAGUAUGAGUG | 94 | CACUCAUACUAACGCCAUG | 790 |
| UAGCCAUGGCGUUAGUAUG | 95 | UAGCCAUGGCGUUAGUAUG | 95 | CAUACUAACGCCAUGGCUA | 791 |
| AGCCAUGGCGUUAGUAUGA | 96 | AGCCAUGGCGUUAGUAUGA | 96 | UCAUACUAACGCCAUGGCU | 792 |
| CCAUGGCGUUAGUAUGAGU | 97 | CCAUGGCGUUAGUAUGAGU | 97 | ACUCAUACUAACGCCAUGG | 793 |
| AUGGCGUUAGUAUGAGUGU | 98 | AUGGCGUUAGUAUGAGUGU | 98 | ACACUCAUACUAACGCCAU | 794 |
| AAGCGUCUAGCCAUGGCGU | 99 | AAGCGUCUAGCCAUGGCGU | 99 | ACGCCAUGGCUAGACGCUU | 795 |
| GUCUAGCCAUGGCGUUAGU | 100 | GUCUAGCCAUGGCGUUAGU | 100 | ACUAACGCCAUGGCUAGAC | 796 |
| AAAGCGUCUAGCCAUGGCG | 101 | AAAGCGUCUAGCCAUGGCG | 101 | CGCCAUGGCUAGACGCUUU | 797 |
| GCGUCUAGCCAUGGCGUUA | 102 | GCGUCUAGCCAUGGCGUUA | 102 | UAACGCCAUGGCUAGACGC | 798 |
| GCCAUGGCGUUAGUAUGAG | 103 | GCCAUGGCGUUAGUAUGAG | 103 | CUCAUACUAACGCCAUGGC | 799 |
| AGCGUCUAGCCAUGGCGUU | 104 | AGCGUCUAGCCAUGGCGUU | 104 | AACGCCAUGGCUAGACGCU | 800 |
| CGUCUAGCCAUGGCGUUAG | 105 | CGUCUAGCCAUGGCGUUAG | 105 | CUAACGCCAUGGCUAGACG | 801 |
| UCUAGCCAUGGCGUUAGUA | 106 | UCUAGCCAUGGCGUUAGUA | 106 | UACUAACGCCAUGGCUAGA | 802 |
| GAAAGCGUCUAGCCAUGGC | 107 | GAAAGCGUCUAGCCAUGGC | 107 | GCCAUGGCUAGACGCUUUC | 803 |
| CUAGCCAUGGCGUUAGUAU | 108 | CUAGCCAUGGCGUUAGUAU | 108 | AUACUAACGCCAUGGCUAG | 804 |
| CACUCCCCUGUGAGGAACU | 109 | CACUCCCCUGUGAGGAACU | 109 | AGUUCCUCACAGGGGAGUG | 805 |
| ACCUCAAAGAAAAACCAAA | 110 | ACCUCAAAGAAAAACCAAA | 110 | UUUGGUUUUUCUUUGAGGU | 806 |
| CGCAGAAAGCGUCUAGCCA | 111 | CGCAGAAAGCGUCUAGCCA | 111 | UGGCUAGACGCUUUCUGCG | 807 |
| GGGUAAGGUCAUCGAUACC | 112 | GGGUAAGGUCAUCGAUACC | 112 | GGUAUCGAUGACCUUACCC | 808 |
| CAGAAAGCGUCUAGCCAUG | 113 | CAGAAAGCGUCUAGCCAUG | 113 | CAUGGCUAGACGCUUUCUG | 809 |
| AAACCUCAAAGAAAAACCA | 114 | AAACCUCAAAGAAAAACCA | 114 | UGGUUUUUCUUUGAGGUUU | 810 |
| GCAGAAAGCGUCUAGCCAU | 115 | GCAGAAAGCGUCUAGCCAU | 115 | AUGGCUAGACGCUUUCUGC | 811 |
| AGAAAGCGUCUAGCCAUGG | 116 | AGAAAGCGUCUAGCCAUGG | 116 | CCAUGGCUAGACGCUUUCU | 812 |
| ACGCAGAAAGCGUCUAGCC | 117 | ACGCAGAAAGCGUCUAGCC | 117 | GGCUAGACGCUUUCUGCGU | 813 |
| AACCUCAAAGAAAAACCAA | 118 | AACCUCAAAGAAAAACCAA | 118 | UUGGUUUUUCUUUGAGGUU | 814 |
| UGGGUAAGGUCAUCGAUAC | 119 | UGGGUAAGGUCAUCGAUAC | 119 | GUAUCGAUGACCUUACCCA | 815 |
| GUAAGGUCAUCGAUACCCU | 120 | GUAAGGUCAUCGAUACCCU | 120 | AGGGUAUCGAUGACCUUAC | 816 |
| UUCACGCAGAAAGCGUCUA | 121 | UUCACGCAGAAAGCGUCUA | 121 | UAGACGCUUUCUGCGUGAA | 817 |
| GGUAAGGUCAUCGAUACCC | 122 | GGUAAGGUCAUCGAUACCC | 122 | GGGUAUCGAUGACCUUACC | 818 |
| AUCACUCCCCUGUGAGGAA | 123 | AUCACUCCCCUGUGAGGAA | 123 | UUCCUCACAGGGGAGUGAU | 819 |
| UCACUCCCCUGUGAGGAAC | 124 | UCACUCCCCUGUGAGGAAC | 124 | GUUCCUCACAGGGGAGUGA | 820 |
| UGUCUUCACGCAGAAAGCG | 125 | UGUCUUCACGCAGAAAGCG | 125 | CGCUUUCUGCGUGAAGACA | 821 |
| UCACGCAGAAAGCGUCUAG | 126 | UCACGCAGAAAGCGUCUAG | 126 | CUAGACGCUUUCUGCGUGA | 822 |
| CACGCAGAAAGCGUCUAGC | 127 | CACGCAGAAAGCGUCUAGC | 127 | GCUAGACGCUUUCUGCGUG | 823 |
| GACCGGGUCCUUUCUUGGA | 128 | GACCGGGUCCUUUCUUGGA | 128 | UCCAAGAAAGGACCCGGUC | 824 |
| GAGGAACUACUGUCUUCAC | 129 | GAGGAACUACUGUCUUCAC | 129 | GUGAAGACAGUAGUUCCUC | 825 |
| CUGUGAGGAACUACUGUCU | 130 | CUGUGAGGAACUACUGUCU | 130 | AGACAGUAGUUCCUCACAG | 826 |
| GGAACUACUGUCUUCACGC | 131 | GGAACUACUGUCUUCACGC | 131 | GCGUGAAGACAGUAGUUCC | 827 |
| ACUCCCCUGUGAGGAACUA | 132 | ACUCCCCUGUGAGGAACUA | 132 | UAGUUCCUCACAGGGGAGU | 828 |
| GUCUUCACGCAGAAAGCGU | 133 | GUCUUCACGCAGAAAGCGU | 133 | ACGCUUUCUGCGUGAAGAC | 829 |
| AGGAACUACUGUCUUCACG | 134 | AGGAACUACUGUCUUCACG | 134 | CGUGAAGACAGUAGUUCCU | 830 |
| CCUGUGAGGAACUACUGUC | 135 | CCUGUGAGGAACUACUGUC | 135 | GACAGUAGUUCCUCACAGG | 831 |
| UGUGAGGAACUACUGUCUU | 136 | UGUGAGGAACUACUGUCUU | 136 | AAGACAGUAGUUCCUCACA | 832 |
| UCUUCACGCAGAAAGCGUC | 137 | UCUUCACGCAGAAAGCGUC | 137 | GACGCUUUCUGCGUGAAGA | 833 |
| GAACUACUGUCUUCACGCA | 138 | GAACUACUGUCUUCACGCA | 138 | UGCGUGAAGACAGUAGUUC | 834 |
| CCCUGUGAGGAACUACUGU | 139 | CCCUGUGAGGAACUACUGU | 139 | ACAGUAGUUCCUCACAGGG | 835 |
| CUUCACGCAGAAAGCGUCU | 140 | CUUCACGCAGAAAGCGUCU | 140 | AGACGCUUUCUGCGUGAAG | 836 |
| UGAGGAACUACUGUCUUCA | 141 | UGAGGAACUACUGUCUUCA | 141 | UGAAGACAGUAGUUCCUCA | 837 |
| UGGCGUUAGUAUGAGUGUC | 142 | UGGCGUUAGUAUGAGUGUC | 142 | GACACUCAUACUAACGCCA | 838 |
| CCCCUGUGAGGAACUACUG | 143 | CCCCUGUGAGGAACUACUG | 143 | CAGUAGUUCCUCACAGGGG | 839 |
| GUGAGGAACUACUGUCUUC | 144 | GUGAGGAACUACUGUCUUC | 144 | GAAGACAGUAGUUCCUCAC | 840 |
| GGCGUUAGUAUGAGUGUCG | 145 | GGCGUUAGUAUGAGUGUCG | 145 | CGACACUCAUACUAACGCC | 841 |
| GCCGAGUAGUGUUGGGUCG | 146 | GCCGAGUAGUGUUGGGUCG | 146 | CGACCCAACACUACUCGGC | 842 |
| ACUGUCUUCACGCAGAAAG | 147 | ACUGUCUUCACGCAGAAAG | 147 | CUUUCUGCGUGAAGACAGU | 843 |
| UGGGUCGCGAAAGGCCUUG | 148 | UGGGUCGCGAAAGGCCUUG | 148 | CAAGGCCUUUCGCGACCCA | 844 |
| CUACUGUCUUCACGCAGAA | 149 | CUACUGUCUUCACGCAGAA | 149 | UUCUGCGUGAAGACAGUAG | 845 |
| CGAGUAGUGUUGGGUCGCG | 150 | CGAGUAGUGUUGGGUCGCG | 150 | CGCGACCCAACACUACUCG | 846 |
| GUAGUGUUGGGUCGCGAAA | 151 | GUAGUGUUGGGUCGCGAAA | 151 | UUUCGCGACCCAACACUAC | 847 |
| UAAACCUCAAAGAAAAACC | 152 | UAAACCUCAAAGAAAAACC | 152 | GGUUUUUCUUUGAGGUUUA | 848 |
| CCGAGUAGUGUUGGGUCGC | 153 | CCGAGUAGUGUUGGGUCGC | 153 | GCGACCCAACACUACUCGG | 849 |
| AGCCGAGUAGUGUUGGGUC | 154 | AGCCGAGUAGUGUUGGGUC | 154 | GACCCAACACUACUCGGCU | 850 |
| GUCGCGAAAGGCCUUGUGG | 155 | GUCGCGAAAGGCCUUGUGG | 155 | CCACAAGGCCUUUCGCGAC | 851 |
| UAGUGUUGGGUCGCGAAAG | 156 | UAGUGUUGGGUCGCGAAAG | 156 | CUUUCGCGACCCAACACUA | 852 |
| CUAGCCGAGUAGUGUUGGG | 157 | CUAGCCGAGUAGUGUUGGG | 157 | CCCAACACUACUCGGCUAG | 853 |
| GAGUAGUGUUGGGUCGCGA | 158 | GAGUAGUGUUGGGUCGCGA | 158 | UCGCGACCCAACACUACUC | 854 |
| UCGCGAAAGGCCUUGUGGU | 159 | UCGCGAAAGGCCUUGUGGU | 159 | ACCACAAGGCCUUUCGCGA | 855 |
| GCGUUAGUAUGAGUGUCGU | 160 | GCGUUAGUAUGAGUGUCGU | 160 | ACGACACUCAUACUAACGC | 856 |
| UAGCCGAGUAGUGUUGGGU | 161 | UAGCCGAGUAGUGUUGGGU | 161 | ACCCAACACUACUCGGCUA | 857 |
| AACUACUGUCUUCACGCAG | 162 | AACUACUGUCUUCACGCAG | 162 | CUGCGUGAAGACAGUAGUU | 858 |
| CGCGAAAGGCCUUGUGGUA | 163 | CGCGAAAGGCCUUGUGGUA | 163 | UACCACAAGGCCUUUCGCG | 859 |
| AGUGUUGGGUCGCGAAAGG | 164 | AGUGUUGGGUCGCGAAAGG | 164 | CCUUUCGCGACCCAACACU | 860 |
| GUUGGGUCGCGAAAGGCCU | 165 | GUUGGGUCGCGAAAGGCCU | 165 | AGGCCUUUCGCGACCCAAC | 861 |
| AGUAGUGUUGGGUCGCGAA | 166 | AGUAGUGUUGGGUCGCGAA | 166 | UUCGCGACCCAACACUACU | 862 |
| UUGGGUCGCGAAAGGCCUU | 167 | UUGGGUCGCGAAAGGCCUU | 167 | AAGGCCUUUCGCGACCCAA | 863 |
| UCCCCUGUGAGGAACUACU | 168 | UCCCCUGUGAGGAACUACU | 168 | AGUAGUUCCUCACAGGGGA | 864 |
| UACUGUCUUCACGCAGAAA | 169 | UACUGUCUUCACGCAGAAA | 169 | UUUCUGCGUGAAGACAGUA | 865 |
| GUGUUGGGUCGCGAAAGGC | 170 | GUGUUGGGUCGCGAAAGGC | 170 | GCCUUUCGCGACCCAACAC | 866 |
| ACUACUGUCUUCACGCAGA | 171 | ACUACUGUCUUCACGCAGA | 171 | UCUGCGUGAAGACAGUAGU | 867 |
| CUGUCUUCACGCAGAAAGC | 172 | CUGUCUUCACGCAGAAAGC | 172 | GCUUUCUGCGUGAAGACAG | 868 |
| GGGUCGCGAAAGGCCUUGU | 173 | GGGUCGCGAAAGGCCUUGU | 173 | ACAAGGCCUUUCGCGACCC | 869 |
| CCUAAACCUCAAAGAAAAA | 174 | CCUAAACCUCAAAGAAAAA | 174 | UUUUUCUUUGAGGUUUAGG | 870 |
| GGUCGCGAAAGGCCUUGUG | 175 | GGUCGCGAAAGGCCUUGUG | 175 | CACAAGGCCUUUCGCGACC | 871 |
| CUAAACCUCAAAGAAAAAC | 176 | CUAAACCUCAAAGAAAAAC | 176 | GUUUUUCUUUGAGGUUUAG | 872 |
| UGUUGGGUCGCGAAAGGCC | 177 | UGUUGGGUCGCGAAAGGCC | 177 | GGCCUUUCGCGACCCAACA | 873 |
| CUCCCCUGUGAGGAACUAC | 178 | CUCCCCUGUGAGGAACUAC | 178 | GUAGUUCCUCACAGGGGAG | 874 |
| UCCUAAACCUCAAAGAAAA | 179 | UCCUAAACCUCAAAGAAAA | 179 | UUUUCUUUGAGGUUUAGGA | 875 |
| ACCGGGUCCUUUCUUGGAU | 180 | ACCGGGUCCUUUCUUGGAU | 180 | AUCCAAGAAAGGACCCGGU | 876 |
| AAUCCUAAACCUCAAAGAA | 181 | AAUCCUAAACCUCAAAGAA | 181 | UUCUUUGAGGUUUAGGAUU | 877 |
| UCAAUGCCUGGAGAUUUGG | 182 | UCAAUGCCUGGAGAUUUGG | 182 | CCAAAUCUCCAGGCAUUGA | 878 |
| AUGCCUGGAGAUUUGGGCG | 183 | AUGCCUGGAGAUUUGGGCG | 183 | CGCCCAAAUCUCCAGGCAU | 879 |
| AAUGCCUGGAGAUUUGGGC | 184 | AAUGCCUGGAGAUUUGGGC | 184 | GCCCAAAUCUCCAGGCAUU | 880 |
| CCGACCUCAUGGGGUACAU | 185 | CCGACCUCAUGGGGUACAU | 185 | AUGUACCCCAUGAGGUCGG | 881 |
| GCUCAAUGCCUGGAGAUUU | 186 | GCUCAAUGCCUGGAGAUUU | 186 | AAAUCUCCAGGCAUUGAGC | 882 |
| CUCAAUGCCUGGAGAUUUG | 187 | CUCAAUGCCUGGAGAUUUG | 187 | CAAAUCUCCAGGCAUUGAG | 883 |
| GCUAGCCGAGUAGUGUUGG | 188 | GCUAGCCGAGUAGUGUUGG | 188 | CCAACACUACUCGGCUAGC | 884 |
| CGCUCAAUGCCUGGAGAUU | 189 | CGCUCAAUGCCUGGAGAUU | 189 | AAUCUCCAGGCAUUGAGCG | 885 |
| CAAUGCCUGGAGAUUUGGG | 190 | CAAUGCCUGGAGAUUUGGG | 190 | CCCAAAUCUCCAGGCAUUG | 886 |
| GCCGACCUCAUGGGGUACA | 191 | GCCGACCUCAUGGGGUACA | 191 | UGUACCCCAUGAGGUCGGC | 887 |
| AUCCUAAACCUCAAAGAAA | 192 | AUCCUAAACCUCAAAGAAA | 192 | UUUCUUUGAGGUUUAGGAU | 888 |
| AGAUUUGGGCGUGCCCCCG | 193 | AGAUUUGGGCGUGCCCCCG | 193 | CGGGGGCACGCCCAAAUCU | 889 |
| CCCGCUCAAUGCCUGGAGA | 194 | CCCGCUCAAUGCCUGGAGA | 194 | UCUCCAGGCAUUGAGCGGG | 890 |
| GAGAUUUGGGCGUGCCCCC | 195 | GAGAUUUGGGCGUGCCCCC | 195 | GGGGGCACGCCCAAAUCUC | 891 |
| GGAGAUUUGGGCGUGCCCC | 196 | GGAGAUUUGGGCGUGCCCC | 196 | GGGGCACGCCCAAAUCUCC | 892 |
| GAUUUGGGCGUGCCCCCGC | 197 | GAUUUGGGCGUGCCCCCGC | 197 | GCGGGGGCACGCCCAAAUC | 893 |
| CCGCUCAAUGCCUGGAGAU | 198 | CCGCUCAAUGCCUGGAGAU | 198 | AUCUCCAGGCAUUGAGCGG | 894 |
| AGUACACCGGAAUUGCCAG | 199 | AGUACACCGGAAUUGCCAG | 199 | CUGGCAAUUCCGGUGUACU | 895 |
| UACACCGGAAUUGCCAGGA | 200 | UACACCGGAAUUGCCAGGA | 200 | UCCUGGCAAUUCCGGUGUA | 896 |
| GAGUACACCGGAAUUGCCA | 201 | GAGUACACCGGAAUUGCCA | 201 | UGGCAAUUCCGGUGUACUC | 897 |
| GUACACCGGAAUUGCCAGG | 202 | GUACACCGGAAUUGCCAGG | 202 | CCUGGCAAUUCCGGUGUAC | 898 |
| UUGCCGCGCAGGGGCCCCA | 203 | UUGCCGCGCAGGGGCCCCA | 203 | UGGGGCCCCUGCGCGGCAA | 899 |
| CUGGAGAUUUGGGCGUGCC | 204 | CUGGAGAUUUGGGCGUGCC | 204 | GGCACGCCCAAAUCUCCAG | 900 |
| GUUGCCGCGCAGGGGCCCC | 205 | GUUGCCGCGCAGGGGCCCC | 205 | GGGGCCCCUGCGCGGCAAC | 901 |
| GCCUGGAGAUUUGGGCGUG | 206 | GCCUGGAGAUUUGGGCGUG | 206 | CACGCCCAAAUCUCCAGGC | 902 |
| UGGAGAUUUGGGCGUGCCC | 207 | UGGAGAUUUGGGCGUGCCC | 207 | GGGCACGCCCAAAUCUCCA | 903 |
| CCUGGAGAUUUGGGCGUGC | 208 | CCUGGAGAUUUGGGCGUGC | 208 | GCACGCCCAAAUCUCCAGG | 904 |
| UGCUAGCCGAGUAGUGUUG | 209 | UGCUAGCCGAGUAGUGUUG | 209 | CAACACUACUCGGCUAGCA | 905 |
| UGCCUGGAGAUUUGGGCGU | 210 | UGCCUGGAGAUUUGGGCGU | 210 | ACGCCCAAAUCUCCAGGCA | 906 |
| CUGCUAGCCGAGUAGUGUU | 211 | CUGCUAGCCGAGUAGUGUU | 211 | AACACUACUCGGCUAGCAG | 907 |
| ACUGCUAGCCGAGUAGUGU | 212 | ACUGCUAGCCGAGUAGUGU | 212 | ACACUACUCGGCUAGCAGU | 908 |
| GACUGCUAGCCGAGUAGUG | 213 | GACUGCUAGCCGAGUAGUG | 213 | CACUACUCGGCUAGCAGUC | 909 |
| AGACUGCUAGCCGAGUAGU | 214 | AGACUGCUAGCCGAGUAGU | 214 | ACUACUCGGCUAGCAGUCU | 910 |
| ACCCGCUCAAUGCCUGGAG | 215 | ACCCGCUCAAUGCCUGGAG | 215 | CUCCAGGCAUUGAGCGGGU | 911 |
| AACCCGCUCAAUGCCUGGA | 216 | AACCCGCUCAAUGCCUGGA | 216 | UCCAGGCAUUGAGCGGGUU | 912 |
| UGCCGCGCAGGGGCCCCAG | 217 | UGCCGCGCAGGGGCCCCAG | 217 | CUGGGGCCCCUGCGCGGCA | 913 |
| AGGGGCCCCAGGUUGGGUG | 218 | AGGGGCCCCAGGUUGGGUG | 218 | CACCCAACCUGGGGCCCCU | 914 |
| GGGCCCCAGGUUGGGUGUG | 219 | GGGCCCCAGGUUGGGUGUG | 219 | CACACCCAACCUGGGGCCC | 915 |
| CAGGGGCCCCAGGUUGGGU | 220 | CAGGGGCCCCAGGUUGGGU | 220 | ACCCAACCUGGGGCCCCUG | 916 |
| GGCCCCAGGUUGGGUGUGC | 221 | GGCCCCAGGUUGGGUGUGC | 221 | GCACACCCAACCUGGGGCC | 917 |
| CGCAGGGGCCCCAGGUUGG | 222 | CGCAGGGGCCCCAGGUUGG | 222 | CCAACCUGGGGCCCCUGCG | 918 |
| UGGGCAGGAUGGCUCCUGU | 223 | UGGGCAGGAUGGCUCCUGU | 223 | ACAGGAGCCAUCCUGCCCA | 919 |
| GCCCCAGGUUGGGUGUGCG | 224 | GCCCCAGGUUGGGUGUGCG | 224 | CGCACACCCAACCUGGGGC | 920 |
| GCAGGGGCCCCAGGUUGGG | 225 | GCAGGGGCCCCAGGUUGGG | 225 | CCCAACCUGGGGCCCCUGC | 921 |
| GGGCAGGAUGGCUCCUGUC | 226 | GGGCAGGAUGGCUCCUGUC | 226 | GACAGGAGCCAUCCUGCCC | 922 |
| GGGGCCCCAGGUUGGGUGU | 227 | GGGGCCCCAGGUUGGGUGU | 227 | ACACCCAACCUGGGGCCCC | 923 |
| GCCGCGCAGGGGCCCCAGG | 228 | GCCGCGCAGGGGCCCCAGG | 228 | CCUGGGGCCCCUGCGCGGC | 924 |
| GCGCAGGGGCCCCAGGUUG | 229 | GCGCAGGGGCCCCAGGUUG | 229 | CAACCUGGGGCCCCUGCGC | 925 |
| CGCGCAGGGGCCCCAGGUU | 230 | CGCGCAGGGGCCCCAGGUU | 230 | AACCUGGGGCCCCUGCGCG | 926 |
| CCGCGCAGGGGCCCCAGGU | 231 | CCGCGCAGGGGCCCCAGGU | 231 | ACCUGGGGCCCCUGCGCGG | 927 |
| AGGACGACCGGGUCCUUUC | 232 | AGGACGACCGGGUCCUUUC | 232 | GAAAGGACCCGGUCGUCCU | 928 |
| CAGGACGACCGGGUCCUUU | 233 | CAGGACGACCGGGUCCUUU | 233 | AAAGGACCCGGUCGUCCUG | 929 |
| UGCCAGGACGACCGGGUCC | 234 | UGCCAGGACGACCGGGUCC | 234 | GGACCCGGUCGUCCUGGCA | 930 |
| AUUGCCAGGACGACCGGGU | 235 | AUUGCCAGGACGACCGGGU | 235 | ACCCGGUCGUCCUGGCAAU | 931 |
| AAUUGCCAGGACGACCGGG | 236 | AAUUGCCAGGACGACCGGG | 236 | CCCGGUCGUCCUGGCAAUU | 932 |
| UUGCCAGGACGACCGGGUC | 237 | UUGCCAGGACGACCGGGUC | 237 | GACCCGGUCGUCCUGGCAA | 933 |
| CCAGGACGACCGGGUCCUU | 238 | CCAGGACGACCGGGUCCUU | 238 | AAGGACCCGGUCGUCCUGG | 934 |
| GCCAGGACGACCGGGUCCU | 239 | GCCAGGACGACCGGGUCCU | 239 | AGGACCCGGUCGUCCUGGC | 935 |
| GAAUUGCCAGGACGACCGG | 240 | GAAUUGCCAGGACGACCGG | 240 | CCGGUCGUCCUGGCAAUUC | 936 |
| ACGACCGGGUCCUUUCUUG | 241 | ACGACCGGGUCCUUUCUUG | 241 | CAAGAAAGGACCCGGUCGU | 937 |
| GACGACCGGGUCCUUUCUU | 242 | GACGACCGGGUCCUUUCUU | 242 | AAGAAAGGACCCGGUCGUC | 938 |
| CGACCGGGUCCUUUCUUGG | 243 | CGACCGGGUCCUUUCUUGG | 243 | CCAAGAAAGGACCCGGUCG | 939 |
| GGACGACCGGGUCCUUUCU | 244 | GGACGACCGGGUCCUUUCU | 244 | AGAAAGGACCCGGUCGUCC | 940 |
| CCGGAAUUGCCAGGACGAC | 245 | CCGGAAUUGCCAGGACGAC | 245 | GUCGUCCUGGCAAUUCCGG | 941 |
| ACACCGGAAUUGCCAGGAC | 246 | ACACCGGAAUUGCCAGGAC | 246 | GUCCUGGCAAUUCCGGUGU | 942 |
| ACCGGAAUUGCCAGGACGA | 247 | ACCGGAAUUGCCAGGACGA | 247 | UCGUCCUGGCAAUUCCGGU | 943 |
| CGGAAUUGCCAGGACGACC | 248 | CGGAAUUGCCAGGACGACC | 248 | GGUCGUCCUGGCAAUUCCG | 944 |
| GGAAUUGCCAGGACGACCG | 249 | GGAAUUGCCAGGACGACCG | 249 | CGGUCGUCCUGGCAAUUCC | 945 |
| CACCGGAAUUGCCAGGACG | 250 | CACCGGAAUUGCCAGGACG | 250 | CGUCCUGGCAAUUCCGGUG | 946 |
| CCCCAGGUUGGGUGUGCGC | 251 | CCCCAGGUUGGGUGUGCGC | 251 | GCGCACACCCAACCUGGGG | 947 |
| GAUCGUUGGUGGAGUUUAC | 252 | GAUCGUUGGUGGAGUUUAC | 252 | GUAAACUCCACCAACGAUC | 948 |
| CAGAUCGUUGGUGGAGUUU | 253 | CAGAUCGUUGGUGGAGUUU | 253 | AAACUCCACCAACGAUCUG | 949 |
| AGAUCGUUGGUGGAGUUUA | 254 | AGAUCGUUGGUGGAGUUUA | 254 | UAAACUCCACCAACGAUCU | 950 |
| CCCAGGUUGGGUGUGCGCG | 255 | CCCAGGUUGGGUGUGCGCG | 255 | CGCGCACACCCAACCUGGG | 951 |
| CCAGGUUGGGUGUGCGCGC | 256 | CCAGGUUGGGUGUGCGCGC | 256 | GCGCGCACACCCAACCUGG | 952 |
| AGGUUGGGUGUGCGCGCGA | 257 | AGGUUGGGUGUGCGCGCGA | 257 | UCGCGCGCACACCCAACCU | 953 |
| CAGGUUGGGUGUGCGCGCG | 258 | CAGGUUGGGUGUGCGCGCG | 258 | CGCGCGCACACCCAACCUG | 954 |
| GGUUGGGUGUGCGCGCGAC | 259 | GGUUGGGUGUGCGCGCGAC | 259 | GUCGCGCGCACACCCAACC | 955 |
| GAAAAACCAAACGUAACAC | 260 | GAAAAACCAAACGUAACAC | 260 | GUGUUACGUUUGGUUUUUC | 956 |
| AGAAAAACCAAACGUAACA | 261 | AGAAAAACCAAACGUAACA | 261 | UGUUACGUUUGGUUUUUCU | 957 |
| AACCAAACGUAACACCAAC | 262 | AACCAAACGUAACACCAAC | 262 | GUUGGUGUUACGUUUGGUU | 958 |
| AAAGAAAAACCAAACGUAA | 263 | AAAGAAAAACCAAACGUAA | 263 | UUACGUUUGGUUUUUCUUU | 959 |
| AAAAACCAAACGUAACACC | 264 | AAAAACCAAACGUAACACC | 264 | GGUGUUACGUUUGGUUUUU | 960 |
| AAGAAAAACCAAACGUAAC | 265 | AAGAAAAACCAAACGUAAC | 265 | GUUACGUUUGGUUUUUCUU | 961 |
| CAAAGAAAAACCAAACGUA | 266 | CAAAGAAAAACCAAACGUA | 266 | UACGUUUGGUUUUUCUUUG | 962 |
| ACCCCCGGCGUAGGUCGCG | 267 | ACCCCCGGCGUAGGUCGCG | 267 | CGCGACCUACGCCGGGGGU | 963 |
| GACCCCCGGCGUAGGUCGC | 268 | GACCCCCGGCGUAGGUCGC | 268 | GCGACCUACGCCGGGGGUC | 964 |
| CGUUAGUAUGAGUGUCGUG | 269 | CGUUAGUAUGAGUGUCGUG | 269 | CACGACACUCAUACUAACG | 965 |
| GUUAGUAUGAGUGUCGUGC | 270 | GUUAGUAUGAGUGUCGUGC | 270 | GCACGACACUCAUACUAAC | 966 |
| UUAGUAUGAGUGUCGUGCA | 271 | UUAGUAUGAGUGUCGUGCA | 271 | UGCACGACACUCAUACUAA | 967 |
| CCAAACGUAACACCAACCG | 272 | CCAAACGUAACACCAACCG | 272 | CGGUUGGUGUUACGUUUGG | 968 |
| ACCAAACGUAACACCPACC | 273 | ACCAAACGUAACACCAACC | 273 | GGUUGGUGUUACGUUUGGU | 969 |
| UUGGGCGUGCCCCCGCGAG | 274 | UUGGGCGUGCCCCCGCGAG | 274 | CUCGCGGGGGCACGCCCAA | 970 |
| AUUUGGGCGUGCCCCCGCG | 275 | AUUUGGGCGUGCCCCCGCG | 275 | CGCGGGGGCACGCCCAAAU | 971 |
| UUUGGGCGUGCCCCCGCGA | 276 | UUUGGGCGUGCCCCCGCGA | 276 | UCGCGGGGGCACGCCCAAA | 972 |
| AAACCAAACGUAACACCAA | 277 | AAACCAAACGUAACACCAA | 277 | UUGGUGUUACGUUUGGUUU | 973 |
| UGGGCGUGCCCCCGCGAGA | 278 | UGGGCGUGCCCCCGCGAGA | 278 | UCUCGCGGGGGCACGCCCA | 974 |
| GUCAGAUCGUUGGUGGAGU | 279 | GUCAGAUCGUUGGUGGAGU | 279 | ACUCCACCAACGAUCUGAC | 975 |
| GUGUCGUGCAGCCUCCAGG | 280 | GUGUCGUGCAGCCUCCAGG | 280 | CCUGGAGGCUGCACGACAC | 976 |
| GGUCAGAUCGUUGGUGGAG | 281 | GGUCAGAUCGUUGGUGGAG | 281 | CUCCACCAACGAUCUGACC | 977 |
| AGUGUCGUGCAGCCUCCAG | 282 | AGUGUCGUGCAGCCUCCAG | 282 | CUGGAGGCUGCACGACACU | 978 |
| GAGUGUCGUGCAGCCUCCA | 283 | GAGUGUCGUGCAGCCUCCA | 283 | UGGAGGCUGCACGACACUC | 979 |
| UCGUAGACCGUGCACCAUG | 284 | UCGUAGACCGUGCACCAUG | 284 | CAUGGUGCACGGUCUACGA | 980 |
| GACCGUGCACCAUGAGCAC | 285 | GACCGUGCACCAUGAGCAC | 285 | GUGCUCAUGGUGCACGGUC | 981 |
| AGUAUGAGUGUCGUGCAGC | 286 | AGUAUGAGUGUCGUGCAGC | 286 | GCUGCACGACACUCAUACU | 982 |
| UAGUAUGAGUGUCGUGCAG | 287 | UAGUAUGAGUGUCGUGCAG | 287 | CUGCACGACACUCAUACUA | 983 |
| UCAGAUCGUUGGUGGAGUU | 288 | UCAGAUCGUUGGUGGAGUU | 288 | AACUCCACCAACGAUCUGA | 984 |
| AGACCGUGCACCAUGAGCA | 289 | AGACCGUGCACCAUGAGCA | 289 | UGCUCAUGGUGCACGGUCU | 985 |
| AAAACCAAACGUAACACCA | 290 | AAAACCAAACGUAACACCA | 290 | UGGUGUUACGUUUGGUUUU | 986 |
| GUAGACCGUGCACCAUGAG | 291 | GUAGACCGUGCACCAUGAG | 291 | CUCAUGGUGCACGGUCUAC | 987 |
| CUCGUAGACCGUGCACCAU | 292 | CUCGUAGACCGUGCACCAU | 292 | AUGGUGCACGGUCUACGAG | 988 |
| CGUAGACCGUGCACCAUGA | 293 | CGUAGACCGUGCACCAUGA | 293 | UCAUGGUGCACGGUCUACG | 989 |
| CCUGGGCUCAGCCCGGGUA | 294 | CCUGGGCUCAGCCCGGGUA | 294 | UACCCGGGCUGAGCCCAGG | 990 |
| UAGACCGUGCACCAUGAGC | 295 | UAGACCGUGCACCAUGAGC | 295 | GCUCAUGGUGCACGGUCUA | 991 |
| GGUCUCGUAGACCGUGCAC | 296 | GGUCUCGUAGACCGUGCAC | 296 | GUGCACGGUCUACGAGACC | 992 |
| UCUCGUAGACCGUGCACCA | 297 | UCUCGUAGACCGUGCACCA | 297 | UGGUGCACGGUCUACGAGA | 993 |
| GUCUCGUAGACCGUGCACC | 298 | GUCUCGUAGACCGUGCACC | 298 | GGUGCACGGUCUACGAGAC | 994 |
| UUGGGUAAGGUCAUCGAUA | 299 | UUGGGUAAGGUCAUCGAUA | 299 | UAUCGAUGACCUUACCCAA | 995 |
| UCGCCGACCUCAUGGGGUA | 300 | UCGCCGACCUCAUGGGGUA | 300 | UACCCCAUGAGGUCGGCGA | 996 |
| CCUCAAAGAAAAACCAAAC | 301 | CCUCAAAGAAAAACCAAAC | 301 | GUUUGGUUUUUCUUUGAGG | 997 |
| GGGCGUGCCCCCGCGAGAC | 302 | GGGCGUGCCCCCGCGAGAC | 302 | GUCUCGCGGGGGCACGCCC | 998 |
| GGAUGAACCGGCUGAUAGC | 303 | GGAUGAACCGGCUGAUAGC | 303 | GCUAUCAGCCGGUUCAUCC | 999 |
| UGGAUGAACCGGCUGAUAG | 304 | UGGAUGAACCGGCUGAUAG | 304 | CUAUCAGCCGGUUCAUCCA | 1000 |
| CUCAAAGAAAAACCAAACG | 305 | CUCAAAGAAAAACCAAACG | 305 | CGUUUGGUUUUUCUUUGAG | 1001 |
| AGGAAGACUUCCGAGCGGU | 306 | AGGAAGACUUCCGAGCGGU | 306 | ACCGCUCGGAAGUCUUCCU | 1002 |
| UCAAAGAAAAACCAAACGU | 307 | UCAAAGAAAAACCAAACGU | 307 | ACGUUUGGUUUUUCUUUGA | 1003 |
| GGAAGACUUCCGAGCGGUC | 308 | GGAAGACUUCCGAGCGGUC | 308 | GACCGCUCGGAAGUCUUCC | 1004 |
| CGCCGACCUCAUGGGGUAC | 309 | CGCCGACCUCAUGGGGUAC | 309 | GUACCCCAUGAGGUCGGCG | 1005 |
| CUUCCGAGCGGUCGCAACC | 310 | CUUCCGAGCGGUCGCAACC | 310 | GGUUGCGACCGCUCGGAAG | 1006 |
| GGCGUGCCCCCGCGAGACU | 311 | GGCGUGCCCCCGCGAGACU | 311 | AGUCUCGCGGGGGCACGCC | 1007 |
| UAUGAGUGUCGUGCAGCCU | 312 | UAUGAGUGUCGUGCAGCCU | 312 | AGGCUGCACGACACUCAUA | 1008 |
| UGCCCCCGCGAGACUGCUA | 313 | UGCCCCCGCGAGACUGCUA | 313 | UAGCAGUCUCGCGGGGGCA | 1009 |
| CGAGACUGCUAGCCGAGUA | 314 | CGAGACUGCUAGCCGAGUA | 314 | UACUCGGCUAGCAGUCUCG | 1010 |
| UGAGUGUCGUGCAGCCUCC | 315 | UGAGUGUCGUGCAGCCUCC | 315 | GGAGGCUGCACGACACUCA | 1011 |
| GCCCCCGCGAGACUGCUAG | 316 | GCCCCCGCGAGACUGCUAG | 316 | CUAGCAGUCUCGCGGGGGC | 1012 |
| GAGACUGCUAGCCGAGUAG | 317 | GAGACUGCUAGCCGAGUAG | 317 | CUACUCGGCUAGCAGUCUC | 1013 |
| CCCCCGCGAGACUGCUAGC | 318 | CCCCCGCGAGACUGCUAGC | 318 | GCUAGCAGUCUCGCGGGGG | 1014 |
| CGCGAGACUGCUAGCCGAG | 319 | CGCGAGACUGCUAGCCGAG | 319 | CUCGGCUAGCAGUCUCGCG | 1015 |
| GUAUGAGUGUCGUGCAGCC | 320 | GUAUGAGUGUCGUGCAGCC | 320 | GGCUGCACGACACUCAUAC | 1016 |
| AUGAGUGUCGUGCAGCCUC | 321 | AUGAGUGUCGUGCAGCCUC | 321 | GAGGCUGCACGACACUCAU | 1017 |
| GCGAGACUGCUAGCCGAGU | 322 | GCGAGACUGCUAGCCGAGU | 322 | ACUCGGCUAGCAGUCUCGC | 1018 |
| CCCCGCGAGACUGCUAGCC | 323 | CCCCGCGAGACUGCUAGCC | 323 | GGCUAGCAGUCUCGCGGGG | 1019 |
| CCGCGAGACUGCUAGCCGA | 324 | CCGCGAGACUGCUAGCCGA | 324 | UCGGCUAGCAGUCUCGCGG | 1020 |
| CCCGCGAGACUGCUAGCCG | 325 | CCCGCGAGACUGCUAGCCG | 325 | CGGCUAGCAGUCUCGCGGG | 1021 |
| GCGUGCCCCCGCGAGACUG | 326 | GCGUGCCCCCGCGAGACUG | 326 | CAGUCUCGCGGGGGCACGC | 1022 |
| GACCCCCCCUCCCGGGAGA | 327 | GACCCCCCCUCCCGGGAGA | 327 | UCUCCCGGGAGGGGGGGUC | 1023 |
| CGGGUCCUUUCUUGGAUCA | 328 | CGGGUCCUUUCUUGGAUCA | 328 | UGAUCCAAGAAAGGACCCG | 1024 |
| GUGCCCCCGCGAGACUGCU | 329 | GUGCCCCCGCGAGACUGCU | 329 | AGCAGUCUCGCGGGGGCAC | 1025 |
| CGUGCCCCCGCGAGACUGC | 330 | CGUGCCCCCGCGAGACUGC | 330 | GCAGUCUCGCGGGGGCACG | 1026 |
| UUCGCCGACCUCAUGGGGU | 331 | UUCGCCGACCUCAUGGGGU | 331 | ACCCCAUGAGGUCGGCGAA | 1027 |
| CGCCCACAGGACGUCAAGU | 332 | CGCCCACAGGACGUCAAGU | 332 | ACUUGACGUCCUGUGGGCG | 1028 |
| GCCCACAGGACGUCAAGUU | 333 | GCCCACAGGACGUCAAGUU | 333 | AACUUGACGUCCUGUGGGC | 1029 |
| ACCCCCCCUCCCGGGAGAG | 334 | ACCCCCCCUCCCGGGAGAG | 334 | CUCUCCCGGGAGGGGGGGU | 1030 |
| GGACCCCCCCUCCCGGGAG | 335 | GGACCCCCCCUCCCGGGAG | 335 | CUCCCGGGAGGGGGGGUCC | 1031 |
| CCGGGUCCUUUCUUGGAUC | 336 | CCGGGUCCUUUCUUGGAUC | 336 | GAUCCAAGAAAGGACCCGG | 1032 |
| CAGGACCCCCCCUCCCGGG | 337 | CAGGACCCCCCCUCCCGGG | 337 | CCCGGGAGGGGGGGUCCUG | 1033 |
| AGGACGUCAAGUUCCCGGG | 338 | AGGACGUCAAGUUCCCGGG | 338 | CCCGGGAACUUGACGUCCU | 1034 |
| AGGACCCCCCCUCCCGGGA | 339 | AGGACCCCCCCUCCCGGGA | 339 | UCCCGGGAGGGGGGGUCCU | 1035 |
| CCACAGGACGUCAAGUUCC | 340 | CCACAGGACGUCAAGUUCC | 340 | GGAACUUGACGUCCUGUGG | 1036 |
| CAGGACGUCAAGUUCCCGG | 341 | CAGGACGUCAAGUUCCCGG | 341 | CCGGGAACUUGACGUCCUG | 1037 |
| ACAGGACGUCAAGUUCCCG | 342 | ACAGGACGUCAAGUUCCCG | 342 | CGGGAACUUGACGUCCUGU | 1038 |
| CACAGGACGUCAAGUUCCC | 343 | CACAGGACGUCAAGUUCCC | 343 | GGGAACUUGACGUCCUGUG | 1039 |
| CAGUGGAUGAACCGGCUGA | 344 | CAGUGGAUGAACCGGCUGA | 344 | UCAGCCGGUUCAUCCACUG | 1040 |
| GGGCUCAGCCCGGGUACCC | 345 | GGGCUCAGCCCGGGUACCC | 345 | GGGUACCCGGGCUGAGCCC | 1041 |
| CCGAGCGGUCGCAACCUCG | 346 | CCGAGCGGUCGCAACCUCG | 346 | CGAGGUUGCGACCGCUCGG | 1042 |
| CUGGGCUCAGCCCGGGUAC | 347 | CUGGGCUCAGCCCGGGUAC | 347 | GUACCCGGGCUGAGCCCAG | 1043 |
| AGUGGAUGAACCGGCUGAU | 348 | AGUGGAUGAACCGGCUGAU | 348 | AUCAGCCGGUUCAUCCACU | 1044 |
| UCCGAGCGGUCGCAACCUC | 349 | UCCGAGCGGUCGCAACCUC | 349 | GAGGUUGCGACCGCUCGGA | 1045 |
| UGGGCUCAGCCCGGGUACC | 350 | UGGGCUCAGCCCGGGUACC | 350 | GGUACCCGGGCUGAGCCCA | 1046 |
| GGUACCCUUGGCCCCUCUA | 351 | GGUACCCUUGGCCCCUCUA | 351 | UAGAGGGGCCAAGGGUACC | 1047 |
| UUCCGAGCGGUCGCAACCU | 352 | UUCCGAGCGGUCGCAACCU | 352 | AGGUUGCGACCGCUCGGAA | 1048 |
| GGGUACCCUUGGCCCCUCU | 353 | GGGUACCCUUGGCCCCUCU | 353 | AGAGGGGCCAAGGGUACCC | 1049 |
| GGGUCCUUUCUUGGAUCAA | 354 | GGGUCCUUUCUUGGAUCAA | 354 | UUGAUCCAAGAAAGGACCC | 1050 |
| CCCACAGGACGUCAAGUUC | 355 | CCCACAGGACGUCAAGUUC | 355 | GAACUUGACGUCCUGUGGG | 1051 |
| GGUUGCUCUUUCUCUAUCU | 356 | GGUUGCUCUUUCUCUAUCU | 356 | AGAUAGAGAAAGAGCAACC | 1052 |
| GUGGGCAGGAUGGCUCCUG | 357 | GUGGGCAGGAUGGCUCCUG | 357 | CAGGAGCCAUCCUGCCCAC | 1053 |
| GGUGGGCAGGAUGGCUCCU | 358 | GGUGGGCAGGAUGGCUCCU | 358 | AGGAGCCAUCCUGCCCACC | 1054 |
| GUUGCUCUUUCUCUAUCUU | 359 | GUUGCUCUUUCUCUAUCUU | 359 | AAGAUAGAGAAAGAGCAAC | 1055 |
| GUGGAUGAACCGGCUGAUA | 360 | GUGGAUGAACCGGCUGAUA | 360 | UAUCAGCCGGUUCAUCCAC | 1056 |
| CCAGGACCCCCCCUCCCGG | 361 | CCAGGACCCCCCCUCCCGG | 361 | CCGGGAGGGGGGGUCCUGG | 1057 |
| GGGUGGGCAGGAUGGCUCC | 362 | GGGUGGGCAGGAUGGCUCC | 362 | GGAGCCAUCCUGCCCACCC | 1058 |
| CUUCACGGAGGCUAUGACU | 363 | CUUCACGGAGGCUAUGACU | 363 | AGUCAUAGCCUCCGUGAAG | 1059 |
| ACCGCCGCCCACAGGACGU | 364 | ACCGCCGCCCACAGGACGU | 364 | ACGUCCUGUGGGCGGCGGU | 1060 |
| UCCAGGACCCCCCCUCCCG | 365 | UCCAGGACCCCCCCUCCCG | 365 | CGGGAGGGGGGGUCCUGGA | 1061 |
| AUAUGAUGAUGAACUGGUC | 366 | AUAUGAUGAUGAACUGGUC | 366 | GACCAGUUCAUCAUCAUAU | 1062 |
| UUCACGGAGGCUAUGACUA | 367 | UUCACGGAGGCUAUGACUA | 367 | UAGUCAUAGCCUCCGUGAA | 1063 |
| UCACGGAGGCUAUGACUAG | 368 | UCACGGAGGCUAUGACUAG | 368 | CUAGUCAUAGCCUCCGUGA | 1064 |
| AUGAACCGGCUGAUAGCGU | 369 | AUGAACCGGCUGAUAGCGU | 369 | ACGCUAUCAGCCGGUUCAU | 1065 |
| GGGAUAUGAUGAUGAACUG | 370 | GGGAUAUGAUGAUGAACUG | 370 | CAGUUCAUCAUCAUAUCCC | 1066 |
| UGCAGUGGAUGAACCGGCU | 371 | UGCAGUGGAUGAACCGGCU | 371 | AGCCGGUUCAUCCACUGCA | 1067 |
| GUGCAGUGGAUGAACCGGC | 372 | GUGCAGUGGAUGAACCGGC | 372 | GCCGGUUCAUCCACUGCAC | 1068 |
| UGAACCGGCUGAUAGCGUU | 373 | UGAACCGGCUGAUAGCGUU | 373 | AACGCUAUCAGCCGGUUCA | 1069 |
| GGAUAUGAUGAUGAACUGG | 374 | GGAUAUGAUGAUGAACUGG | 374 | CCAGUUCAUCAUCAUAUCC | 1070 |
| GCUCUUUCUCUAUCUUCCU | 375 | GCUCUUUCUCUAUCUUCCU | 375 | AGGAAGAUAGAGAAAGAGC | 1071 |
| GGGGGCGACACUCCACCAU | 376 | GGGGGCGACACUCCACCAU | 376 | AUGGUGGAGUGUCGCCCCC | 1072 |
| GAUGAACCGGCUGAUAGCG | 377 | GAUGAACCGGCUGAUAGCG | 377 | CGCUAUCAGCCGGUUCAUC | 1073 |
| GAUAUGAUGAUGAACUGGU | 378 | GAUAUGAUGAUGAACUGGU | 378 | ACCAGUUCAUCAUCAUAUC | 1074 |
| UGGGAUAUGAUGAUGAACU | 379 | UGGGAUAUGAUGAUGAACU | 379 | AGUUCAUCAUCAUAUCCCA | 1075 |
| UUGCUCUUUCUCUAUCUUC | 380 | UUGCUCUUUCUCUAUCUUC | 380 | GAAGAUAGAGAAAGAGCAA | 1076 |
| UGGGGGCGACACUCCACCA | 381 | UGGGGGCGACACUCCACCA | 381 | UGGUGGAGUGUCGCCCCCA | 1077 |
| UGCUCUUUCUCUAUCUUCC | 382 | UGCUCUUUCUCUAUCUUCC | 382 | GGAAGAUAGAGAAAGAGCA | 1078 |
| GGUCCUUUCUUGGAUCAAC | 383 | GGUCCUUUCUUGGAUCAAC | 383 | GUUGAUCCAAGAAAGGACC | 1079 |
| AAGACUUCCGAGCGGUCGC | 384 | AAGACUUCCGAGCGGUCGC | 384 | GCGACCGCUCGGAAGUCUU | 1080 |
| AGCCCGGGUACCCUUGGCC | 385 | AGCCCGGGUACCCUUGGCC | 385 | GGCCAAGGGUACCCGGGCU | 1081 |
| UUUCUUGGAUCAACCCGCU | 386 | UUUCUUGGAUCAACCCGCU | 386 | AGCGGGUUGAUCCAAGAAA | 1082 |
| CAGCCCGGGUACCCUUGGC | 387 | CAGCCCGGGUACCCUUGGC | 387 | GCCAAGGGUACCCGGGCUG | 1083 |
| AGACUUCCGAGCGGUCGCA | 388 | AGACUUCCGAGCGGUCGCA | 388 | UGCGACCGCUCGGAAGUCU | 1084 |
| UUCUUGGAUCAACCCGCUC | 389 | UUCUUGGAUCAACCCGCUC | 389 | GAGCGGGUUGAUCCAAGAA | 1085 |
| CCCGGGUACCCUUGGCCCC | 390 | CCCGGGUACCCUUGGCCCC | 390 | GGGGCCAAGGGUACCCGGG | 1086 |
| GUCCUUUCUUGGAUCAACC | 391 | GUCCUUUCUUGGAUCAACC | 391 | GGUUGAUCCAAGAAAGGAC | 1087 |
| CUUUCUUGGAUCAACCCGC | 392 | CUUUCUUGGAUCAACCCGC | 392 | GCGGGUUGAUCCAAGAAAG | 1088 |
| CCUUUCUUGGAUCAACCCG | 393 | CCUUUCUUGGAUCAACCCG | 393 | CGGGUUGAUCCAAGAAAGG | 1089 |
| UCCUUUCUUGGAUCAACCC | 394 | UCCUUUCUUGGAUCAACCC | 394 | GGGUUGAUCCAAGAAAGGA | 1090 |
| AAGUUCCCGGGCGGUGGUC | 395 | AAGUUCCCGGGCGGUGGUC | 395 | GACCACCGCCCGGGAACUU | 1091 |
| GCAGUGGAUGPACCGGCUG | 396 | GCAGUGGAUGAACCGGCUG | 396 | CAGCCGGUUCAUCCACUGC | 1092 |
| CCGGGUACCCUUGGCCCCU | 397 | CCGGGUACCCUUGGCCCCU | 397 | AGGGGCCAAGGGUACCCGG | 1093 |
| AGUUCCCGGGCGGUGGUCA | 398 | AGUUCCCGGGCGGUGGUCA | 398 | UGACCACCGCCCGGGAACU | 1094 |
| CUUGGAUCAACCCGCUCAA | 399 | CUUGGAUCAACCCGCUCAA | 399 | UUGAGCGGGUUGAUCCAAG | 1095 |
| GGAUCAACCCGCUCAAUGC | 400 | GGAUCAACCCGCUCAAUGC | 400 | GCAUUGAGCGGGUUGAUCC | 1096 |
| ACUUCCGAGCGGUCGCAAC | 401 | ACUUCCGAGCGGUCGCAAC | 401 | GUUGCGACCGCUCGGAAGU | 1097 |
| UCUUGGAUCAACCCGCUCA | 402 | UCUUGGAUCAACCCGCUCA | 402 | UGAGCGGGUUGAUCCAAGA | 1098 |
| UUGGAUCAACCCGCUCAAU | 403 | UUGGAUCAACCCGCUCAAU | 403 | AUUGAGCGGGUUGAUCCAA | 1099 |
| AACCGCCGCCCACAGGACG | 404 | AACCGCCGCCCACAGGACG | 404 | CGUCCUGUGGGCGGCGGUU | 1100 |
| GCGUGAACUAUGCAACAGG | 405 | GCGUGAACUAUGCAACAGG | 405 | CCUGUUGCAUAGUUCACGC | 1101 |
| AUCAACCCGCUCAAUGCCU | 406 | AUCAACCCGCUCAAUGCCU | 406 | AGGCAUUGAGCGGGUUGAU | 1102 |
| GAUCAACCCGCUCAAUGCC | 407 | GAUCAACCCGCUCAAUGCC | 407 | GGCAUUGAGCGGGUUGAUC | 1103 |
| CAACCCGCUCAAUGCCUGG | 408 | CAACCCGCUCAAUGCCUGG | 408 | CCAGGCAUUGAGCGGGUUG | 1104 |
| GCUUCGCCGACCUCAUGGG | 409 | GCUUCGCCGACCUCAUGGG | 409 | CCCAUGAGGUCGGCGAAGC | 1105 |
| GACUUCCGAGCGGUCGCAA | 410 | GACUUCCGAGCGGUCGCAA | 410 | UUGCGACCGCUCGGAAGUC | 1106 |
| UCAACCCGCUCAAUGCCUG | 411 | UCAACCCGCUCAAUGCCUG | 411 | CAGGCAUUGAGCGGGUUGA | 1107 |
| GGCUUCGCCGACCUCAUGG | 412 | GGCUUCGCCGACCUCAUGG | 412 | CCAUGAGGUCGGCGAAGCC | 1108 |
| UGGAUCAACCCGCUCAAUG | 413 | UGGAUCAACCCGCUCAAUG | 413 | CAUUGAGCGGGUUGAUCCA | 1109 |
| CGGGCGGUGGUCAGAUCGU | 414 | CGGGCGGUGGUCAGAUCGU | 414 | ACGAUCUGACCACCGCCCG | 1110 |
| CUUGGCCCCUCUAUGGCAA | 415 | CUUGGCCCCUCUAUGGCAA | 415 | UUGCCAUAGAGGGGCCAAG | 1111 |
| CCGGGCGGUGGUCAGAUCG | 416 | CCGGGCGGUGGUCAGAUCG | 416 | CGAUCUGACCACCGCCCGG | 1112 |
| UGGGGUGGGCAGGAUGGCU | 417 | UGGGGUGGGCAGGAUGGCU | 417 | AGCCAUCCUGCCCACCCCA | 1113 |
| GGAGUUUACCUGUUGCCGC | 418 | GGAGUUUACCUGUUGCCGC | 418 | GCGGCAACAGGUAAACUCC | 1114 |
| CCUUGGCCCCUCUAUGGCA | 419 | CCUUGGCCCCUCUAUGGCA | 419 | UGCCAUAGAGGGGCCAAGG | 1115 |
| GUGGAGUUUACCUGUUGCC | 420 | GUGGAGUUUACCUGUUGCC | 420 | GGCAACAGGUAAACUCCAC | 1116 |
| GGUGGAGUUUACCUGUUGC | 421 | GGUGGAGUUUACCUGUUGC | 421 | GCAACAGGUAAACUCCACC | 1117 |
| UUCCCGGGCGGUGGUCAGA | 422 | UUCCCGGGCGGUGGUCAGA | 422 | UCUGACCACCGCCCGGGAA | 1118 |
| UGAACUAUGCAACAGGGAA | 423 | UGAACUAUGCAACAGGGAA | 423 | UUCCCUGUUGCAUAGUUCA | 1119 |
| AGUUUACCUGUUGCCGCGC | 424 | AGUUUACCUGUUGCCGCGC | 424 | GCGCGGCAACAGGUAAACU | 1120 |
| GUGAACUAUGCAACAGGGA | 425 | GUGAACUAUGCAACAGGGA | 425 | UCCCUGUUGCAUAGUUCAC | 1121 |
| UUACCUGUUGCCGCGCAGG | 426 | UUACCUGUUGCCGCGCAGG | 426 | CCUGCGCGGCAACAGGUAA | 1122 |
| UCCCGGGCGGUGGUCAGAU | 427 | UCCCGGGCGGUGGUCAGAU | 427 | AUCUGACCACCGCCCGGGA | 1123 |
| GUUCCCGGGCGGUGGUCAG | 428 | GUUCCCGGGCGGUGGUCAG | 428 | CUGACCACCGCCCGGGAAC | 1124 |
| GCCCGGGUACCCUUGGCCC | 429 | GCCCGGGUACCCUUGGCCC | 429 | GGGCCAAGGGUACCCGGGC | 1125 |
| AAGGAGAUGAAGGCGAAGG | 430 | AAGGAGAUGAAGGCGAAGG | 430 | CCUUCGCCUUCAUCUCCUU | 1126 |
| AGGAGAUGAAGGCGAAGGC | 431 | AGGAGAUGAAGGCGAAGGC | 431 | GCCUUCGCCUUCAUCUCCU | 1127 |
| GUUUACCUGUUGCCGCGCA | 432 | GUUUACCUGUUGCCGCGCA | 432 | UGCGCGGCAACAGGUAAAC | 1128 |
| CUGUUGCCGCGCAGGGGCC | 433 | CUGUUGCCGCGCAGGGGCC | 433 | GGCCCCUGCGCGGCAACAG | 1129 |
| AACACCAACCGCCGCCCAC | 434 | AACACCAACCGCCGCCCAC | 434 | GUGGGCGGCGGUUGGUGUU | 1130 |
| GAGUUUACCUGUUGCCGCG | 435 | GAGUUUACCUGUUGCCGCG | 435 | CGCGGCAACAGGUAAACUC | 1131 |
| UUUACCUGUUGCCGCGCAG | 436 | UUUACCUGUUGCCGCGCAG | 436 | CUGCGCGGCAACAGGUAAA | 1132 |
| GGGGUGGGCAGGAUGGCUC | 437 | GGGGUGGGCAGGAUGGCUC | 437 | GAGCCAUCCUGCCCACCCC | 1133 |
| GAAGACUUCCGAGCGGUCG | 438 | GAAGACUUCCGAGCGGUCG | 438 | CGACCGCUCGGAAGUCUUC | 1134 |
| ACCUGUUGCCGCGCAGGGG | 439 | ACCUGUUGCCGCGCAGGGG | 439 | CCCCUGCGCGGCAACAGGU | 1135 |
| UACCUGUUGCCGCGCAGGG | 440 | UACCUGUUGCCGCGCAGGG | 440 | CCCUGCGCGGCAACAGGUA | 1136 |
| UACCUCUUCAACUGGGCAG | 441 | UACCUCUUCAACUGGGCAG | 441 | CUGCCCAGUUGAAGAGGUA | 1137 |
| CGUGAACUAUGCAACAGGG | 442 | CGUGAACUAUGCAACAGGG | 442 | CCCUGUUGCAUAGUUCACG | 1138 |
| ACACCAACCGCCGCCCACA | 443 | ACACCAACCGCCGCCCACA | 443 | UGUGGGCGGCGGUUGGUGU | 1139 |
| CCCGGGCGGUGGUCAGAUC | 444 | CCCGGGCGGUGGUCAGAUC | 444 | GAUCUGACCACCGCCCGGG | 1140 |
| ACCUCUUCAACUGGGCAGU | 445 | ACCUCUUCAACUGGGCAGU | 445 | ACUGCCCAGUUGAAGAGGU | 1141 |
| CUUCGCCGACCUCAUGGGG | 446 | CUUCGCCGACCUCAUGGGG | 446 | CCCCAUGAGGUCGGCGAAG | 1142 |
| CCUGUUGCCGCGCAGGGGC | 447 | CCUGUUGCCGCGCAGGGGC | 447 | GCCCCUGCGCGGCAACAGG | 1143 |
| CCAACCGCCGCCCACAGGA | 448 | CCAACCGCCGCCCACAGGA | 448 | UCCUGUGGGCGGCGGUUGG | 1144 |
| ACCAACCGCCGCCCACAGG | 449 | ACCAACCGCCGCCCACAGG | 449 | CCUGUGGGCGGCGGUUGGU | 1145 |
| UGGAGUUUACCUGUUGCCG | 450 | UGGAGUUUACCUGUUGCCG | 450 | CGGCAACAGGUAAACUCCA | 1146 |
| CACCAACCGCCGCCCACAG | 451 | CACCAACCGCCGCCCACAG | 451 | CUGUGGGCGGCGGUUGGUG | 1147 |
| CAAACGUAACACCAACCGC | 452 | CAAACGUAACACCAACCGC | 452 | GCGGUUGGUGUUACGUUUG | 1148 |
| CAAGCGGAGACGGCUGGAG | 453 | CAAGCGGAGACGGCUGGAG | 453 | CUCCAGCCGUCUCCGCUUG | 1149 |
| ACGGAGGCUAUGACUAGGU | 454 | ACGGAGGCUAUGACUAGGU | 454 | ACCUAGUCAUAGCCUCCGU | 1150 |
| UAACACCAACCGCCGCCCA | 455 | UAACACCAACCGCCGCCCA | 455 | UGGGCGGCGGUUGGUGUUA | 1151 |
| AUCGUUGGUGGAGUUUACC | 456 | AUCGUUGGUGGAGUUUACC | 456 | GGUAAACUCCACCAACGAU | 1152 |
| GGGAGACAUAUAUCACAGC | 457 | GGGAGACAUAUAUCACAGC | 457 | GCUGUGAUAUAUGUCUCCC | 1153 |
| AACCUCGUGGAAGGCGACA | 458 | AACCUCGUGGAAGGCGACA | 458 | UGUCGCCUUCCACGAGGUU | 1154 |
| GGGGGAGACAUAUAUCACA | 459 | GGGGGAGACAUAUAUCACA | 459 | UGUGAUAUAUGUCUCCCCC | 1155 |
| AACGUAACACCAACCGCCG | 460 | AACGUAACACCAACCGCCG | 460 | CGGCGGUUGGUGUUACGUU | 1156 |
| AAACGUAACACCAACCGCC | 461 | AAACGUAACACCAACCGCC | 461 | GGCGGUUGGUGUUACGUUU | 1157 |
| GGGGAGACAUAUAUCACAG | 462 | GGGGAGACAUAUAUCACAG | 462 | CUGUGAUAUAUGUCUCCCC | 1158 |
| GAGAUGAAGGCGAAGGCGU | 463 | GAGAUGAAGGCGAAGGCGU | 463 | ACGCCUUCGCCUUCAUCUC | 1159 |
| AAGCGGAGACGGCUGGAGC | 464 | AAGCGGAGACGGCUGGAGC | 464 | GCUCCAGCCGUCUCCGCUU | 1160 |
| GUACCCUUGGCCCCUCUAU | 465 | GUACCCUUGGCCCCUCUAU | 465 | AUAGAGGGGCCAAGGGUAC | 1161 |
| CCUCCAGGACCCCCCCUCC | 466 | CCUCCAGGACCCCCCCUCC | 466 | GGAGGGGGGGUCCUGGAGG | 1162 |
| CUCCAGGACCCCCCCUCCC | 467 | CUCCAGGACCCCCCCUCCC | 467 | GGGAGGGGGGGUCCUGGAG | 1163 |
| UACCCUUGGCCCCUCUAUG | 468 | UACCCUUGGCCCCUCUAUG | 468 | CAUAGAGGGGCCAAGGGUA | 1164 |
| CAACCUCGUGGAAGGCGAC | 469 | CAACCUCGUGGAAGGCGAC | 469 | GUCGCCUUCCACGAGGUUG | 1165 |
| CGGAGGCUAUGACUAGGUA | 470 | CGGAGGCUAUGACUAGGUA | 470 | UACCUAGUCAUAGCCUCCG | 1166 |
| GGAGAUGAAGGCGAAGGCG | 471 | GGAGAUGAAGGCGAAGGCG | 471 | CGCCUUCGCCUUCAUCUCC | 1167 |
| AGAUGAAGGCGAAGGCGUC | 472 | AGAUGAAGGCGAAGGCGUC | 472 | GACGCCUUCGCCUUCAUCU | 1168 |
| GUAACACCAACCGCCGCCC | 473 | GUAACACCAACCGCCGCCC | 473 | GGGCGGCGGUUGGUGUUAC | 1169 |
| CGUAACACCAACCGCCGCC | 474 | CGUAACACCAACCGCCGCC | 474 | GGCGGCGGUUGGUGUUACG | 1170 |
| ACGUAACACCAACCGCCGC | 475 | ACGUAACACCAACCGCCGC | 475 | GCGGCGGUUGGUGUUACGU | 1171 |
| CACGGAGGCUAUGACUAGG | 476 | CACGGAGGCUAUGACUAGG | 476 | CCUAGUCAUAGCCUCCGUG | 1172 |
| GUUGGUGGAGUUUACCUGU | 477 | GUUGGUGGAGUUUACCUGU | 477 | ACAGGUAAACUCCACCAAC | 1173 |
| CGUUGGUGGAGUUUACCUG | 478 | CGUUGGUGGAGUUUACCUG | 478 | CAGGUAAACUCCACCAACG | 1174 |
| ACCCUUGGCCCCUCUAUGG | 479 | ACCCUUGGCCCCUCUAUGG | 479 | CCAUAGAGGGGCCAAGGGU | 1175 |
| UUGGUGGAGUUUACCUGUU | 480 | UUGGUGGAGUUUACCUGUU | 480 | AACAGGUAAACUCCACCAA | 1176 |
| UGGUGGAGUUUACCUGUUG | 481 | UGGUGGAGUUUACCUGUUG | 481 | CAACAGGUAAACUCCACCA | 1177 |
| UCGUUGGUGGAGUUUACCU | 482 | UCGUUGGUGGAGUUUACCU | 482 | AGGUAAACUCCACCAACGA | 1178 |
| CGGGUACCCUUGGCCCCUC | 483 | CGGGUACCCUUGGCCCCUC | 483 | GAGGGGCCAAGGGUACCCG | 1179 |
| GGCUCAGCCCGGGUACCCU | 484 | GGCUCAGCCCGGGUACCCU | 484 | AGGGUACCCGGGCUGAGCC | 1180 |
| GAUCACUCCCCUGUGAGGA | 485 | GAUCACUCCCCUGUGAGGA | 485 | UCCUCACAGGGGAGUGAUC | 1181 |
| GGUGGUCAGAUCGUUGGUG | 486 | GGUGGUCAGAUCGUUGGUG | 486 | CACCAACGAUCUGACCACC | 1182 |
| GAUGAAGGCGAAGGCGUCC | 487 | GAUGAAGGCGAAGGCGUCC | 487 | GGACGCCUUCGCCUUCAUC | 1183 |
| AGGAUGGCUCCUGUCACCC | 488 | AGGAUGGCUCCUGUCACCC | 488 | GGGUGACAGGAGCCAUCCU | 1184 |
| CUCAGCCCGGGUACCCUUG | 489 | CUCAGCCCGGGUACCCUUG | 489 | CAAGGGUACCCGGGCUGAG | 1185 |
| UCAGCCCGGGUACCCUUGG | 490 | UCAGCCCGGGUACCCUUGG | 490 | CCAAGGGUACCCGGGCUGA | 1186 |
| AUGAAGGCGAAGGCGUCCA | 491 | AUGAAGGCGAAGGCGUCCA | 491 | UGGACGCCUUCGCCUUCAU | 1187 |
| CGGGGGAGACAUAUAUCAC | 492 | CGGGGGAGACAUAUAUCAC | 492 | GUGAUAUAUGUCUCCCCCG | 1188 |
| CAGGAUGGCUCCUGUCACC | 493 | CAGGAUGGCUCCUGUCACC | 493 | GGUGACAGGAGCCAUCCUG | 1189 |
| UGAAGGCGAAGGCGUCCAC | 494 | UGAAGGCGAAGGCGUCCAC | 494 | GUGGACGCCUUCGCCUUCA | 1190 |
| UGGUCAGAUCGUUGGUGGA | 495 | UGGUCAGAUCGUUGGUGGA | 495 | UCCACCAACGAUCUGACCA | 1191 |
| GCUCAGCCCGGGUACCCUU | 496 | GCUCAGCCCGGGUACCCUU | 496 | AAGGGUACCCGGGCUGAGC | 1192 |
| GUGGUCAGAUCGUUGGUGG | 497 | GUGGUCAGAUCGUUGGUGG | 497 | CCACCAACGAUCUGACCAC | 1193 |
| CAGCCUCCAGGACCCCCCC | 498 | CAGCCUCCAGGACCCCCCC | 498 | GGGGGGGUCCUGGAGGCUG | 1194 |
| GGCGGUGGUCAGAUCGUUG | 499 | GGCGGUGGUCAGAUCGUUG | 499 | CAACGAUCUGACCACCGCC | 1195 |
| GCCUCCAGGACCCCCCCUC | 500 | GCCUCCAGGACCCCCCCUC | 500 | GAGGGGGGGUCCUGGAGGC | 1196 |
| AACCGGCUGAUAGCGUUCG | 501 | AACCGGCUGAUAGCGUUCG | 501 | CGAACGCUAUCAGCCGGUU | 1197 |
| AGCCUCCAGGACCCCCCCU | 502 | AGCCUCCAGGACCCCCCCU | 502 | AGGGGGGGUCCUGGAGGCU | 1198 |
| CGGCUUCGCCGACCUCAUG | 503 | CGGCUUCGCCGACCUCAUG | 503 | CAUGAGGUCGGCGAAGCCG | 1199 |
| GCGGAGACGGCUGGAGCGC | 504 | GCGGAGACGGCUGGAGCGC | 504 | GCGCUCCAGCCGUCUCCGC | 1200 |
| UCAUGGGGUACAUUCCGCU | 505 | UCAUGGGGUACAUUCCGCU | 505 | AGCGGAAUGUACCCCAUGA | 1201 |
| GAACCGGCUGAUAGCGUUC | 506 | GAACCGGCUGAUAGCGUUC | 506 | GAACGCUAUCAGCCGGUUC | 1202 |
| GCGGUGGUCAGAUCGUUGG | 507 | GCGGUGGUCAGAUCGUUGG | 507 | CCAACGAUCUGACCACCGC | 1203 |
| GGCAGGAUGGCUCCUGUCA | 508 | GGCAGGAUGGCUCCUGUCA | 508 | UGACAGGAGCCAUCCUGCC | 1204 |
| GCAGGAUGGCUCCUGUCAC | 509 | GCAGGAUGGCUCCUGUCAC | 509 | GUGACAGGAGCCAUCCUGC | 1205 |
| AUUUGGGUAAGGUCAUCGA | 510 | AUUUGGGUAAGGUCAUCGA | 510 | UCGAUGACCUUACCCAAAU | 1206 |
| ACCGGCUGAUAGCGUUCGC | 511 | ACCGGCUGAUAGCGUUCGC | 511 | GCGAACGCUAUCAGCCGGU | 1207 |
| CGGAGACGGCUGGAGCGCG | 512 | CGGAGACGGCUGGAGCGCG | 512 | CGCGCUCCAGCCGUCUCCG | 1208 |
| GCGGCUUCGCCGACCUCAU | 513 | GCGGCUUCGCCGACCUCAU | 513 | AUGAGGUCGGCGAAGCCGC | 1209 |
| AAUUUGGGUAAGGUCAUCG | 514 | AAUUUGGGUAAGGUCAUCG | 514 | CGAUGACCUUACCCAAAUU | 1210 |
| GGGCGGUGGUCAGAUCGUU | 515 | GGGCGGUGGUCAGAUCGUU | 515 | AACGAUCUGACCACCGCCC | 1211 |
| CAACCGCCGCCCACAGGAC | 516 | CAACCGCCGCCCACAGGAC | 516 | GUCCUGUGGGCGGCGGUUG | 1212 |
| UGCGGCUUCGCCGACCUCA | 517 | UGCGGCUUCGCCGACCUCA | 517 | UGAGGUCGGCGAAGCCGCA | 1213 |
| CGGUGGUCAGAUCGUUGGU | 518 | CGGUGGUCAGAUCGUUGGU | 518 | ACCAACGAUCUGACCACCG | 1214 |
| UUGGGUGUGCGCGCGACUA | 519 | UUGGGUGUGCGCGCGACUA | 519 | UAGUCGCGCGCACACCCAA | 1215 |
| GUGUGCGCGCGACUAGGAA | 520 | GUGUGCGCGCGACUAGGAA | 520 | UUCCUAGUCGCGCGCACAC | 1216 |
| GAUGGCUCCUGUCACCCCG | 521 | GAUGGCUCCUGUCACCCCG | 521 | CGGGGUGACAGGAGCCAUC | 1217 |
| GGAUGGCUCCUGUCACCCC | 522 | GGAUGGCUCCUGUCACCCC | 522 | GGGGUGACAGGAGCCAUCC | 1218 |
| UGUGCGCGCGACUAGGAAG | 523 | UGUGCGCGCGACUAGGAAG | 523 | CUUCCUAGUCGCGCGCACA | 1219 |
| UGGGUGUGCGCGCGACUAG | 524 | UGGGUGUGCGCGCGACUAG | 524 | CUAGUCGCGCGCACACCCA | 1220 |
| GGUGUGCGCGCGACUAGGA | 525 | GGUGUGCGCGCGACUAGGA | 525 | UCCUAGUCGCGCGCACACC | 1221 |
| GGGUGUGCGCGCGACUAGG | 526 | GGGUGUGCGCGCGACUAGG | 526 | CCUAGUCGCGCGCACACCC | 1222 |
| CCCCGGCGUAGGUCGCGUA | 527 | CCCCGGCGUAGGUCGCGUA | 527 | UACGCGACCUACGCCGGGG | 1223 |
| GAAGGCGACAACCUAUCCC | 528 | GAAGGCGACAACCUAUCCC | 528 | GGGAUAGGUUGUCGCCUUC | 1224 |
| CCCGGCGUAGGUCGCGUAA | 529 | CCCGGCGUAGGUCGCGUAA | 529 | UUACGCGACCUACGCCGGG | 1225 |
| AGCGGAGACGGCUGGAGCG | 530 | AGCGGAGACGGCUGGAGCG | 530 | CGCUCCAGCCGUCUCCGCU | 1226 |
| CCCCCGGCGUAGGUCGCGU | 531 | CCCCCGGCGUAGGUCGCGU | 531 | ACGCGACCUACGCCGGGGG | 1227 |
| AGGCGAAGGCGUCCACAGU | 532 | AGGCGAAGGCGUCCACAGU | 532 | ACUGUGGACGCCUUCGCCU | 1228 |
| AAGGCGAAGGCGUCCACAG | 533 | AAAGGCGAAGGCGUCCACA | 533 | CUGUGGACGCCUUCGCCUU | 1229 |
| GUUGGGUGUGCGCGCGACU | 534 | GUUGGGUGUGCGCGCGACU | 534 | AGUCGCGCGCACACCCAAC | 1230 |
| CUCAUGGGGUACAUUCCGC | 535 | CUCAUGGGGUACAUUCCGC | 535 | GCGGAAUGUACCCCAUGAG | 1231 |
| GGAAGGCGACAACCUAUCC | 536 | GGAAGGCGACAACCUAUCC | 536 | GGAUAGGUUGUCGCCUUCC | 1232 |
| GCAAGUUCCUUGCCGACGG | 537 | GCAAGUUCCUUGCCGACGG | 537 | CCGUCGGCAAGGAACUUGC | 1233 |
| UGCAGCCUCCAGGACCCCC | 538 | UGCAGCCUCCAGGACCCCC | 538 | GGGGGUCCUGGAGGCUGCA | 1234 |
| GGACUGCACGAUGCUCGUG | 539 | GGACUGCACGAUGCUCGUG | 539 | CACGAGCAUCGUGCAGUCC | 1235 |
| GAAGGCGAAGGCGUCCACA | 540 | GAAGGCGAAGGCGUCCACA | 540 | UGUGGACGCCUUCGCCUUC | 1236 |
| GCAACCUCGUGGAAGGCGA | 541 | GCAACCUCGUGGAAGGCGA | 541 | UCGCCUUCCACGAGGUUGC | 1237 |
| GACGCGGGCUGUGCUUGGU | 542 | GACGCGGGCUGUGCUUGGU | 542 | ACCAAGCACAGCCCGCGUC | 1238 |
| ACGCGGGCUGUGCUUGGUA | 543 | ACGCGGGCUGUGCUUGGUA | 543 | UACCAAGCACAGCCCGCGU | 1239 |
| GUGCAGCCUCCAGGACCCC | 544 | GUGCAGCCUCCAGGACCCC | 544 | GGGGUCCUGGAGGCUGCAC | 1240 |
| GCAGCCUCCAGGACCCCCC | 545 | GCAGCCUCCAGGACCCCCC | 545 | GGGGGGUCCUGGAGGCUGC | 1241 |
| CGCAACCUCGUGGAAGGCG | 546 | CGCAACCUCGUGGAAGGCG | 546 | CGCCUUCCACGAGGUUGCG | 1242 |
| UGUCGUGCAGCCUCCAGGA | 547 | UGUCGUGCAGCCUCCAGGA | 547 | UCCUGGAGGCUGCACGACA | 1243 |
| AUGGCUUGGGAUAUGAUGA | 548 | AUGGCUUGGGAUAUGAUGA | 548 | UCAUCAUAUCCCAAGCCAU | 1244 |
| CUUGGGAUAUGAUGAUGAA | 549 | CUUGGGAUAUGAUGAUGAA | 549 | UUCAUCAUCAUAUCCCAAG | 1245 |
| CCCUUGGCCCCUCUAUGGC | 550 | CCCUUGGCCCCUCUAUGGC | 550 | GCCAUAGAGGGGCCAAGGG | 1246 |
| UGGCUUGGGAUAUGAUGAU | 551 | UGGCUUGGGAUAUGAUGAU | 551 | AUCAUCAUAUCCCAAGCCA | 1247 |
| CUGUGCAGUGGAUGAACCG | 552 | CUGUGCAGUGGAUGAACCG | 552 | CGGUUCAUCCACUGCACAG | 1248 |
| AUGACGCGGGCUGUGCUUG | 553 | AUGACGCGGGCUGUGCUUG | 553 | CAAGCACAGCCCGCGUCAU | 1249 |
| GCUUGGGAUAUGAUGAUGA | 554 | GCUUGGGAUAUGAUGAUGA | 554 | UCAUCAUCAUAUCCCAAGC | 1250 |
| UAUGACGCGGGCUGUGCUU | 555 | UAUGACGCGGGCUGUGCUU | 555 | AAGCACAGCCCGCGUCAUA | 1251 |
| UGACGCGGGCUGUGCUUGG | 556 | UGACGCGGGCUGUGCUUGG | 556 | CCAAGCACAGCCCGCGUCA | 1252 |
| GGCUUGGGAUAUGAUGAUG | 557 | GGCUUGGGAUAUGAUGAUG | 557 | CAUCAUCAUAUCCCAAGCC | 1253 |
| UGUGCAGUGGAUGAACCGG | 558 | UGUGCAGUGGAUGAACCGG | 558 | CCGGUUCAUCCACUGCACA | 1254 |
| GCUGUGCAGUGGAUGAACC | 559 | GCUGUGCAGUGGAUGAACC | 559 | GGUUCAUCCACUGCACAGC | 1255 |
| CUCUUCAACUGGGCAGUAA | 560 | CUCUUCAACUGGGCAGUAA | 560 | UUACUGCCCAGUUGAAGAG | 1256 |
| CCUCGUGGAAGGCGACAAC | 561 | CCUCGUGGAAGGCGACAAC | 561 | GUUGUCGCCUUCCACGAGG | 1257 |
| UGUGUCACCCAGACAGUCG | 562 | UGUGUCACCCAGACAGUCG | 562 | CGACUGUCUGGGUGACACA | 1258 |
| GGCGUGAACUAUGCAACAG | 563 | GGCGUGAACUAUGCAACAG | 563 | CUGUUGCAUAGUUCACGCC | 1259 |
| CGGCGUGAACUAUGCAACA | 564 | CGGCGUGAACUAUGCAACA | 564 | UGUUGCAUAGUUCACGCCG | 1260 |
| GUGUCACCCAGACAGUCGA | 565 | GUGUCACCCAGACAGUCGA | 565 | UCGACUGUCUGGGUGACAC | 1261 |
| CCUCUUCAACUGGGCAGUA | 566 | CCUCUUCAACUGGGCAGUA | 566 | UACUGCCCAGUUGAAGAGG | 1262 |
| CGUGGAAGGCGACAACCUA | 567 | CGUGGAAGGCGACAACCUA | 567 | UAGGUUGUCGCCUUCCACG | 1263 |
| UCGUGGAAGGCGACAACCU | 568 | UCGUGGAAGGCGACAACCU | 568 | AGGUUGUCGCCUUCCACGA | 1264 |
| CGGCCUAGUUGGGGCCCCA | 569 | CGGCCUAGUUGGGGCCCCA | 569 | UGGGGCCCCAACUAGGCCG | 1265 |
| CGACUAGGAAGACUUCCGA | 570 | CGACUAGGAAGACUUCCGA | 570 | UCGGAAGUCUUCCUAGUCG | 1266 |
| UUUGGGUAAGGUCAUCGAU | 571 | UUUGGGUAAGGUCAUCGAU | 571 | AUCGAUGACCUUACCCAAA | 1267 |
| GUGGAAGGCGACAACCUAU | 572 | GUGGAAGGCGACAACCUAU | 572 | AUAGGUUGUCGCCUUCCAC | 1268 |
| ACCUCGUGGAAGGCGACAA | 573 | ACCUCGUGGAAGGCGACAA | 573 | UUGUCGCCUUCCACGAGGU | 1269 |
| GCGACUAGGAAGACUUCCG | 574 | GCGACUAGGAAGACUUCCG | 574 | CGGAAGUCUUCCUAGUCGC | 1270 |
| GUCGUGCAGCCUCCAGGAC | 575 | GUCGUGCAGCCUCCAGGAC | 575 | GUCCUGGAGGCUGCACGAC | 1271 |
| UAGGAAGACUUCCGAGCGG | 576 | UAGGAAGACUUCCGAGCGG | 576 | CCGCUCGGAAGUCUUCCUA | 1272 |
| ACGGCGUGAACUAUGCAAC | 577 | ACGGCGUGAACUAUGCAAC | 577 | GUUGCAUAGUUCACGCCGU | 1273 |
| CUCGUGGAAGGCGACAACC | 578 | CUCGUGGAAGGCGACAACC | 578 | GGUUGUCGCCUUCCACGAG | 1274 |
| GGUCGCAACCUCGUGGAAG | 579 | GGUCGCAACCUCGUGGAAG | 579 | CUUCCACGAGGUUGCGACC | 1275 |
| CGGUCGCAACCUCGUGGAA | 580 | CGGUCGCAACCUCGUGGAA | 580 | UUCCACGAGGUUGCGACCG | 1276 |
| GCGCGCGACUAGGAAGACU | 581 | GCGCGCGACUAGGAAGACU | 581 | AGUCUUCCUAGUCGCGCGC | 1277 |
| GACGGCGUGAACUAUGCAA | 582 | GACGGCGUGAACUAUGCAA | 582 | UUGCAUAGUUCACGCCGUC | 1278 |
| UAGAUCACUCCCCUGUGAG | 583 | UAGAUCACUCCCCUGUGAG | 583 | CUCACAGGGGAGUGAUCUA | 1279 |
| AGCGGUCGCAACCUCGUGG | 584 | AGCGGUCGCAACCUCGUGG | 584 | CCACGAGGUUGCGACCGCU | 1280 |
| UGGAAGGCGACAACCUAUC | 585 | UGGAAGGCGACAACCUAUC | 585 | GAUAGGUUGUCGCCUUCCA | 1281 |
| CGCGCGACUAGGAAGACUU | 586 | CGCGCGACUAGGAAGACUU | 586 | AAGUCUUCCUAGUCGCGCG | 1282 |
| CUAGGAAGACUUCCGAGCG | 587 | CUAGGAAGACUUCCGAGCG | 587 | CGCUCGGAAGUCUUCCUAG | 1283 |
| GUGCGCGCGACUAGGAAGA | 588 | GUGCGCGCGACUAGGAAGA | 588 | UCUUCCUAGUCGCGCGCAC | 1284 |
| AGAUCACUCCCCUGUGAGG | 589 | AGAUCACUCCCCUGUGAGG | 589 | CCUCACAGGGGAGUGAUCU | 1285 |
| UGCGCGCGACUAGGAAGAC | 590 | UGCGCGCGACUAGGAAGAC | 590 | GUCUUCCUAGUCGCGCGCA | 1286 |
| AUAGAUCACUCCCCUGUGA | 591 | AUAGAUCACUCCCCUGUGA | 591 | UCACAGGGGAGUGAUCUAU | 1287 |
| GAGCGGUCGCAACCUCGUG | 592 | GAGCGGUCGCAACCUCGUG | 592 | CACGAGGUUGCGACCGCUC | 1288 |
| CACGAACGACUGCUCCAAC | 593 | CACGAACGACUGCUCCAAC | 593 | GUUGGAGCAGUCGUUCGUG | 1289 |
| GGCAAGUUCCUUGCCGACG | 594 | GGCAAGUUCCUUGCCGACG | 594 | CGUCGGCAAGGAACUUGCC | 1290 |
| UCGUGCAGCCUCCAGGACC | 595 | UCGUGCAGCCUCCAGGACC | 595 | GGUCCUGGAGGCUGCACGA | 1291 |
| GUCACGAACGACUGCUCCA | 596 | GUCACGAACGACUGCUCCA | 596 | UGGAGCAGUCGUUCGUGAC | 1292 |
| GCGGUCGCAACCUCGUGGA | 597 | GCGGUCGCAACCUCGUGGA | 597 | UCCACGAGGUUGCGACCGC | 1293 |
| GCGCGACUAGGAAGACUUC | 598 | GCGCGACUAGGAAGACUUC | 598 | GAAGUCUUCCUAGUCGCGC | 1294 |
| GCUAUGACGCGGGCUGUGC | 599 | GCUAUGACGCGGGCUGUGC | 599 | GCACAGCCCGCGUCAUAGC | 1295 |
| UCACGAACGACUGCUCCAA | 600 | UCACGAACGACUGCUCCAA | 600 | UUGGAGCAGUCGUUCGUGA | 1296 |
| UCGCAACCUCGUGGAAGGC | 601 | UCGCAACCUCGUGGAAGGC | 601 | GCCUUCCACGAGGUUGCGA | 1297 |
| CGUGCAGCCUCCAGGACCC | 602 | CGUGCAGCCUCCAGGACCC | 602 | GGGUCCUGGAGGCUGCACG | 1298 |
| GUCGCAACCUCGUGGAAGG | 603 | GUCGCAACCUCGUGGAAGG | 603 | CCUUCCACGAGGUUGCGAC | 1299 |
| ACUAGGAAGACUUCCGAGC | 604 | ACUAGGAAGACUUCCGAGC | 604 | GCUCGGAAGUCUUCCUAGU | 1300 |
| CGCGACUAGGAAGACUUCC | 605 | CGCGACUAGGAAGACUUCC | 605 | GGAAGUCUUCCUAGUCGCG | 1301 |
| UGGGCGAAGCACAUGUGGA | 606 | UGGGCGAAGCACAUGUGGA | 606 | UCCACAUGUGCUUCGCCCA | 1302 |
| CCUUGCCUACUAUUCCAUG | 607 | CCUUGCCUACUAUUCCAUG | 607 | CAUGGAAUAGUAGGCAAGG | 1303 |
| GCCUCAGGAAACUUGGGGU | 608 | GCCUCAGGAAACUUGGGGU | 608 | ACCCCAAGUUUCCUGAGGC | 1304 |
| UGCUAUGACGCGGGCUGUG | 609 | UGCUAUGACGCGGGCUGUG | 609 | CACAGCCCGCGUCAUAGCA | 1305 |
| UCGUGCUCGCCACCGCUAC | 610 | UCGUGCUCGCCACCGCUAC | 610 | GUAGCGGUGGCGAGCACGA | 1306 |
| UGCCUCAGGAAACUUGGGG | 611 | UGCCUCAGGAAACUUGGGG | 611 | CCCCAAGUUUCCUGAGGCA | 1307 |
| UGUCUCGUGCCCGACCCCG | 612 | UGUCUCGUGCCCGACCCCG | 612 | CGGGGUCGGGCACGAGACA | 1308 |
| UGUGGCGGCAGGAGAUGGG | 613 | UGUGGCGGCAGGAGAUGGG | 613 | CCCAUCUCCUGCCGCCACA | 1309 |
| GUCGUGCUCGCCACCGCUA | 614 | GUCGUGCUCGCCACCGCUA | 614 | UAGCGGUGGCGAGCACGAC | 1310 |
| GAUUUCCACUACGUGACGG | 615 | GAUUUCCACUACGUGACGG | 615 | CCGUCACGUAGUGGAAAUC | 1311 |
| GGGCCUUGCCUACUAUUCC | 616 | GGGCCUUGCCUACUAUUCC | 616 | GGAAUAGUAGGCAAGGCCC | 1312 |
| GCCUUGCCUACUAUUCCAU | 617 | GCCUUGCCUACUAUUCCAU | 617 | AUGGAAUAGUAGGCAAGGC | 1313 |
| GACUAGGAAGACUUCCGAG | 618 | GACUAGGAAGACUUCCGAG | 618 | CUCGGAAGUCUUCCUAGUC | 1314 |
| GCGGGGGAGACAUAUAUCA | 619 | GCGGGGGAGACAUAUAUCA | 619 | UGAUAUAUGUCUCCCCCGC | 1315 |
| CGAGCGGUCGCAACCUCGU | 620 | CGAGCGGUCGCAACCUCGU | 620 | ACGAGGUUGCGACCGCUCG | 1316 |
| GGCCUUGCCUACUAUUCCA | 621 | GGCCUUGCCUACUAUUCCA | 621 | UGGAAUAGUAGGCAAGGCC | 1317 |
| AUUUCCACUACGUGACGGG | 622 | AUUUCCACUACGUGACGGG | 622 | CCCGUCACGUAGUGGAAAU | 1318 |
| GGACGUCAAGUUCCCGGGC | 623 | GGACGUCAAGUUCCCGGGC | 623 | GCCCGGGAACUUGACGUCC | 1319 |
| GAGUGCUAUGACGCGGGCU | 624 | GAGUGCUAUGACGCGGGCU | 624 | AGCCCGCGUCAUAGCACUC | 1320 |
| GACGUCAAGUUCCCGGGCG | 625 | GACGUCAAGUUCCCGGGCG | 625 | CGCCCGGGAACUUGACGUC | 1321 |
| UCAGCGACGGGUCUUGGUC | 626 | UCAGCGACGGGUCUUGGUC | 626 | GACCAAGACCCGUCGCUGA | 1322 |
| UCAAGUUCCCGGGCGGUGG | 627 | UCAAGUUCCCGGGCGGUGG | 627 | CCACCGCCCGGGAACUUGA | 1323 |
| UCAAGGAGAUGAAGGCGAA | 628 | UCAAGGAGAUGAAGGCGAA | 628 | UUCGCCUUCAUCUCCUUGA | 1324 |
| CCUAUCCCCAAGGCUCGCC | 629 | CCUAUCCCCAAGGCUCGCC | 629 | GGCGAGCCUUGGGGAUAGG | 1325 |
| CUUGACCUACCUCAGAUCA | 630 | CUUGACCUACCUCAGAUCA | 630 | UGAUCUGAGGUAGGUCAAG | 1326 |
| UUUCCACUACGUGACGGGC | 631 | UUUCCACUACGUGACGGGC | 631 | GCCCGUCACGUAGUGGAAA | 1327 |
| AGUGCUAUGACGCGGGCUG | 632 | AGUGCUAUGACGCGGGCUG | 632 | CAGCCCGCGUCAUAGCACU | 1328 |
| ACGUCAAGUUCCCGGGCGG | 633 | ACGUCAAGUUCCCGGGCGG | 633 | CCGCCCGGGAACUUGACGU | 1329 |
| UCUGGAGACAUCGGGCCAG | 634 | UCUGGAGACAUCGGGCCAG | 634 | CUGGCCCGAUGUCUCCAGA | 1330 |
| GGGCGAAGCACAUGUGGAA | 635 | GGGCGAAGCACAUGUGGAA | 635 | UUCCACAUGUGCUUCGCCC | 1331 |
| UUGACCUACCUCAGAUCAU | 636 | UUGACCUACCUCAGAUCAU | 636 | AUGAUCUGAGGUAGGUCAA | 1332 |
| CCAAGCGGAGACGGCUGGA | 637 | CCAAGCGGAGACGGCUGGA | 637 | UCCAGCCGUCUCCGCUUGG | 1333 |
| ACCAAGCGGAGACGGCUGG | 638 | ACCAAGCGGAGACGGCUGG | 638 | CCAGCCGUCUCCGCUUGGU | 1334 |
| GGGUGGCUUCAUGCCUCAG | 639 | GGGUGGCUUCAUGCCUCAG | 639 | CUGAGGCAUGAAGCCACCC | 1335 |
| GUCAAGUUCCCGGGCGGUG | 640 | GUCAAGUUCCCGGGCGGUG | 640 | CACCGCCCGGGAACUUGAC | 1336 |
| CUCAAGGAGAUGAAGGCGA | 641 | CUCAAGGAGAUGAAGGCGA | 641 | UCGCCUUCAUCUCCUUGAG | 1337 |
| GACCAAGCGGAGACGGCUG | 642 | GACCAAGCGGAGACGGCUG | 642 | CAGCCGUCUCCGCUUGGUC | 1338 |
| UCCAGGUCGGGCUCAACCA | 643 | UCCAGGUCGGGCUCAACCA | 643 | UGGUUGAGCCCGACCUGGA | 1339 |
| CUCUUUCUCUAUCUUCCUC | 644 | CUCUUUCUCUAUCUUCCUC | 644 | GAGGAAGAUAGAGAAAGAG | 1340 |
| GUCUGGAGACAUCGGGCCA | 645 | GUCUGGAGACAUCGGGCCA | 645 | UGGCCCGAUGUCUCCAGAC | 1341 |
| GUUGUGACUUGGCCCCCGA | 646 | GUUGUGACUUGGCCCCCGA | 646 | UCGGGGGCCAAGUCACAAC | 1342 |
| AGACCUGGCUCCAGUCCAA | 647 | AGACCUGGCUCCAGUCCAA | 647 | UUGGACUGGAGCCAGGUCU | 1343 |
| CUUGCCUACUAUUCCAUGG | 648 | CUUGCCUACUAUUCCAUGG | 648 | CCAUGGAAUAGUAGGCAAG | 1344 |
| CCCGGUUGCUCUUUCUCUA | 649 | CCCGGUUGCUCUUUCUCUA | 649 | UAGAGAAAGAGCAACCGGG | 1345 |
| CUUUCUCUAUCUUCCUCUU | 650 | CUUUCUCUAUCUUCCUCUU | 650 | AAGAGGAAGAUAGAGAAAG | 1346 |
| AGGGUGGCUUCAUGCCUCA | 651 | AGGGUGGCUUCAUGCCUCA | 651 | UGAGGCAUGAAGCCACCCU | 1347 |
| AAGACCUGGCUCCAGUCCA | 652 | AAGACCUGGCUCCAGUCCA | 652 | UGGACUGGAGCCAGGUCUU | 1348 |
| CCGGUUGCUCUUUCUCUAU | 653 | CCGGUUGCUCUUUCUCUAU | 653 | AUAGAGAAAGAGCAACCGG | 1349 |
| CGGUUGCUCUUUCUCUAUC | 654 | CGGUUGCUCUUUCUCUAUC | 654 | GAUAGAGAAAGAGCAACCG | 1350 |
| UGGGGGAUUUCCACUACGU | 655 | UGGGGGAUUUCCACUACGU | 655 | ACGUAGUGGAAAUCCCCCA | 1351 |
| AUGUCACGAACGACUGCUC | 656 | AUGUCACGAACGACUGCUC | 656 | GAGCAGUCGUUCGUGACAU | 1352 |
| GGCCUAGUUGGGGCCCCAC | 657 | GGCCUAGUUGGGGCCCCAC | 657 | GUGGGGCCCCAACUAGGCC | 1353 |
| UGGACCAAGCGGAGACGGC | 658 | UGGACCAAGCGGAGACGGC | 658 | GCCGUCUCCGCUUGGUCCA | 1354 |
| UUCCAGGUCGGGCUCAACC | 659 | UUCCAGGUCGGGCUCAACC | 659 | GGUUGAGCCCGACCUGGAA | 1355 |
| AGCGGGUCGAGUUCCUGGU | 660 | AGCGGGUCGAGUUCCUGGU | 660 | ACCAGGAACUCGACCCGCU | 1356 |
| CAAGGAGAUGAAGGCGAAG | 661 | CAAGGAGAUGAAGGCGAAG | 661 | CUUCGCCUUCAUCUCCUUG | 1357 |
| CAUGUCACGAACGACUGCU | 662 | CAUGUCACGAACGACUGCU | 662 | AGCAGUCGUUCGUGACAUG | 1358 |
| CAGCGGGUCGAGUUCCUGG | 663 | CAGCGGGUCGAGUUCCUGG | 663 | CCAGGAACUCGACCCGCUG | 1359 |
| UUCCACUACGUGACGGGCA | 664 | UUCCACUACGUGACGGGCA | 664 | UGCCCGUCACGUAGUGGAA | 1360 |
| UAGGGUGGCUUCAUGCCUC | 665 | UAGGGUGGCUUCAUGCCUC | 665 | GAGGCAUGAAGCCACCCUA | 1361 |
| UCCAGGACUGCACGAUGCU | 666 | UCCAGGACUGCACGAUGCU | 666 | AGCAUCGUGCAGUCCUGGA | 1362 |
| UCCACUACGUGACGGGCAU | 667 | UCCACUACGUGACGGGCAU | 667 | AUGCCCGUCACGUAGUGGA | 1363 |
| AAUAGGGUGGCUUCAUGCC | 668 | AAUAGGGUGGCUUCAUGCC | 668 | GGCAUGAAGCCACCCUAUU | 1364 |
| GUCUUCACGGAGGCUAUGA | 669 | GUCUUCACGGAGGCUAUGA | 669 | UCAUAGCCUCCGUGAAGAC | 1365 |
| AUAGGGUGGCUUCAUGCCU | 670 | AUAGGGUGGCUUCAUGCCU | 670 | AGGCAUGAAGCCACCCUAU | 1366 |
| UCUUCACGGAGGCUAUGAC | 671 | UCUUCACGGAGGCUAUGAC | 671 | GUCAUAGCCUCCGUGAAGA | 1367 |
| AUGCCUCAGGAAACUUGGG | 672 | AUGCCUCAGGAAACUUGGG | 672 | CCCAAGUUUCCUGAGGCAU | 1368 |
| ACCGGGACGUGCUCAAGGA | 673 | ACCGGGACGUGCUCAAGGA | 673 | UCCUUGAGCACGUCCCGGU | 1369 |
| GGGGCUGUGCAGUGGAUGA | 674 | GGGGCUGUGCAGUGGAUGA | 674 | UCAUCCACUGCACAGCCCC | 1370 |
| AAGCUCCAGGACUGCACGA | 675 | AAGCUCCAGGACUGCACGA | 675 | UCGUGCAGUCCUGGAGCUU | 1371 |
| GCUCCAGGACUGCACGAUG | 676 | GCUCCAGGACUGCACGAUG | 676 | CAUCGUGCAGUCCUGGAGC | 1372 |
| UACCGGGACGUGCUCAAGG | 677 | UACCGGGACGUGCUCAAGG | 677 | CCUUGAGCACGUCCCGGUA | 1373 |
| GGGCUGUGCAGUGGAUGAA | 678 | GGGCUGUGCAGUGGAUGAA | 678 | UUCAUCCACUGCACAGCCC | 1374 |
| CGUCAAGUUCCCGGGCGGU | 679 | CGUCAAGUUCCCGGGCGGU | 679 | ACCGCCCGGGAACUUGACG | 1375 |
| UCAAUAGGGUGGCUUCAUG | 680 | UCAAUAGGGUGGCUUCAUG | 680 | CAUGAAGCCACCCUAUUGA | 1376 |
| AGUCUUCACGGAGGCUAUG | 681 | AGUCUUCACGGAGGCUAUG | 681 | CAUAGCCUCCGUGAAGACU | 1377 |
| GGACCAAGCGGAGACGGCU | 682 | GGACCAAGCGGAGACGGCU | 682 | AGCCGUCUCCGCUUGGUCC | 1378 |
| GGCUCCAGUCCAAGCUCCU | 683 | GGCUCCAGUCCAAGCUCCU | 683 | AGGAGCUUGGACUGGAGCC | 1379 |
| GGCUGUGCAGUGGAUGAAC | 684 | GGCUGUGCAGUGGAUGAAC | 684 | GUUCAUCCACUGCACAGCC | 1380 |
| CUCCAGGACUGCACGAUGC | 685 | CUCCAGGACUGCACGAUGC | 685 | GCAUCGUGCAGUCCUGGAG | 1381 |
| GAGUCUUCACGGAGGCUAU | 686 | GAGUCUUCACGGAGGCUAU | 686 | AUAGCCUCCGUGAAGACUC | 1382 |
| UGGCUCCAGUCCAAGCUCC | 687 | UGGCUCCAGUCCAAGCUCC | 687 | GGAGCUUGGACUGGAGCCA | 1383 |
| GGGGAUUUCCACUACGUGA | 688 | GGGGAUUUCCACUACGUGA | 688 | UCACGUAGUGGAAAUCCCC | 1384 |
| CAUGCCUCAGGAAACUUGG | 689 | CAUGCCUCAGGAAACUUGG | 689 | CCAAGUUUCCUGAGGCAUG | 1385 |
| AUCAAUAGGGUGGCUUCAU | 690 | AUCAAUAGGGUGGCUUCAU | 690 | AUGAAGCCACCCUAUUGAU | 1386 |
| GCGGGCCUUGCCUACUAUU | 691 | GCGGGCCUUGCCUACUAUU | 691 | AAUAGUAGGCAAGGCCCGC | 1387 |
| CCGGGACGUGCUCAAGGAG | 692 | CCGGGACGUGCUCAAGGAG | 692 | CUCCUUGAGCACGUCCCGG | 1388 |
| CCAUGGUGGGGAACUGGGC | 693 | CCAUGGUGGGGAACUGGGC | 693 | GCCCAGUUCCCCACCAUGG | 1389 |
| CAAUAGGGUGGCUUCAUGC | 694 | CAAUAGGGUGGCUUCAUGC | 694 | GCAUGAAGCCACCCUAUUG | 1390 |
| AGCUCCAGGACUGCACGAU | 695 | AGCUCCAGGACUGCACGAU | 695 | AUCGUGCAGUCCUGGAGCU | 1391 |
| CGGGCCUUGCCUACUAUUC | 696 | CGGGCCUUGCCUACUAUUC | 696 | GAAUAGUAGGCAAGGCCCG | 1392 |

[0682] The 3′-ends of the Upper sequence and the Lower sequence of the siNA construct can include an overhang sequence, for example about 1, 2, 3, or 4 nucleotides in length, preferably 2 nucleotides in length, wherein the overhanging sequence of the lower sequence is optionally complementary to a portion of the target sequence. The upper sequence is also referred to as the sense strand, whereas the lower sequence is also referred to as the antisense strand. The upper and lower sequences in the Table can further comprise a chemical modification having Formulae I-VII, such as exemplary siNA constructs shown in FIGS. 4 and 5, or having modifications described in Table IV or any combination thereof.

TABLE III

HCV Synthetic Modified siNA Constructs

| | | | | | | |
|---|---|---|---|---|---|---|
| Target | | Seq | | | | Seq |
| Pos | Target | ID | Cmpd# | Aliases | Sequence | ID |

| | | | | | | |
|---|---|---|---|---|---|---|
| 183 | GGUCCUUUCUUGGAUCAACCCGC | 1393 | 25237 | HCV IRES Loop IIIb | B GGUCCUUUCUUGGAUCAACCC B | 1467 |
| | | | | (Heptazyme site) as | | |
| | | | | siNA str1 (sense) | | |
| 183 | GGUCCUUUCUUGGAUCAACCCGC | 1393 | 25238 | HCV IRES Loop IIIb | B GGGUUGAUCCAAGAAAGGACC B | 1468 |
| | | | | (Heptazyme site) as | | |
| | | | | siNA str2 (antisense) | | |
| 183 | GGUCCUUUCUUGGAUCAACCCGC | 1393 | 25251 | HCV IRES Loop IIIb | B CCCAACUAGGUUCUUUCCUGG B | 1469 |
| | | | | (Heptazyme site) as | | |
| | | | | siNA str1 (sense) | | |
| | | | | Inverted Control | | |
| 183 | GGUCCUUUCUUGGAUCAACCCGC | 1393 | 25252 | HCV IRES Loop IIIb | B CCAGGAAAGAACCUAGUUGGG B | 1470 |
| | | | | (Heptazyme site) as | | |
| | | | | siNA str1 (sense) | | |
| | | | | Inverted Control | | |
| | | | | Compliment | | |
| 183 | GGUCCUUUCUUGGAUCAACCCGC | 1393 | 25814 | HCV IRES Loop IIIb | GGUCCUUUCUUGGAUCAACCCUU | 1471 |
| | | | | (Heptazyme site) as | | |
| | | | | siNA str1 (sense) | | |
| | | | | +2U overhang | | |
| 183 | GGUCCUUUCUUGGAUCAACCCGC | 1393 | 25815 | HCV IRES Loop IlIb | GGGUUGAUCCAAGAAAGGACCUU | 1472 |
| | | | | (Heptazyme site) as | | |
| | | | | siNA str2 (antisense) | | |
| | | | | +2U overhang | | |
| 183 | GGUCCUUUCUUGGAUCAACCCGC | 1393 | 25834 | HCV IRES Loop IIIb | BGGUCCUUUCUUGGAUCAACCCUUB | 1473 |
| | | | | (Heptazyme site) as | | |
| | | | | siNA str1 (sense) | | |
| | | | | +2U overhang | | |
| 183 | GGUCCUUUCUUGGAUCAACCCGC | 1393 | 25835 | HCV IRES Loop IIIb | BGGGUUGAUCCAAGAAAGGACCUUB | 1474 |
| | | | | (Heptazyme site) as | | |
| | | | | siNA str2 (antisense) | | |
| | | | | +2U overhang | | |
| 325 | UGCCCCGGGAGGUCUCGUAGACC | 1394 | 28415 | HCVa:325U21 sense | CCCCGGGAGGUCUCGUAGATT | 1475 |
| | | | | TT siNA | | |
| 162 | CGGAACCGGUGAGUACACC | 54 | 28416 | HCVa:162U21 sense | CGGAACCGGUGAGUACACCTT | 1476 |
| | | | | TT siNA | | |
| 324 | GCCCCGGGAGGUCUCGUAG | 1 | 28417 | HCVa:324U21 sense | GCCCCGGGAGGUCUCGUAGTT | 1477 |
| | | | | TT siNA | | |
| 163 | GGAACCGGUGAGUACACCG | 53 | 28418 | HCVa:163U21 sense | GGAACCGGUGAGUACACCGTT | 1478 |
| | | | | TT siNA | | |
| 294 | GUGGUACUGCCUGAUAGGG | 5 | 28419 | HCVa:294U21 sense | GUGGUACUGCCUGAUAGGGTT | 1479 |
| | | | | TT siNA | | |
| 293 | UGUGGUACUGCCUGAUAGG | 2 | 28420 | HCVa:293U21 sense | UGUGGUACUGCCUGAUAGGTT | 1480 |
| | | | | TT siNA | | |
| 292 | UUGUGGUACUGCCUGAUAG | 3 | 28421 | HCVa:292U21 sense | UUGUGGUACUGCCUGAUAGTT | 1481 |
| | | | | TT siNA | | |
| 325 | UGCCCCGGGAGGUCUCGUAGACC | 1394 | 28422 | HCVa:343L21 antisense | UCUACGAGACCUCCCGGGGTT | 1482 |
| | | | | TV siNA (325C) | | |
| 162 | CGGAACCGGUGAGUACACC | 54 | 28423 | HCVa:180L21 antisense | GGUGUACUCACCGGUUCCGTT | 1483 |
| | | | | TV siNA (162C) | | |
| 324 | GCCCCGGGAGGUCUCGUAG | 1 | 28424 | HCVa:342L21 antisense | CUACGAGACCUCCCGGGGCTT | 1484 |
| | | | | TT siNA (324C) | | |
| 163 | GGAACCGGUGAGUACACCG | 53 | 28425 | HCVa:181L21 antisense | CGGUGUACUCACCGGUUCCTT | 1485 |
| | | | | TT siNA (163C) | | |
| 294 | GUGGUACUGCCUGAUAGGG | 5 | 28426 | HCVa:312L21 antisense | CCCUAUCAGGCAGUACCACTT | 1486 |
| | | | | TT siNA (294C) | | |
| 293 | UGUGGUACUGCCUGAUAGG | 2 | 28427 | HCVa:311L21 antisense | CCUAUCAGGCAGUACCACATT | 1487 |
| | | | | TT siNA (293C) | | |
| 292 | UUGUGGUACUGCCUGAUAG | 3 | 28428 | HCVa:310L21 antisense | CUAUCAGGCAGUACCACAATT | 1488 |
| | | | | TT siNA (292C) | | |
| 325 | UGCCCCGGGAGGUCUCGUAGACC | 1394 | 28429 | HCVa:325U21 sense TT | TTAGAUGCUCUGGAGGGCCCC | 1489 |
| | | | | siNA inv | | |
| 162 | CGGAACCGGUGAGUACACC | 54 | 28430 | HCVa:162U21 sense TT | TTCCACAUGAGUGGCCAAGGC | 1490 |
| | | | | siNA inv | | |
| 324 | GCCCCGGGAGGUCUCGUAG | 1 | 28431 | HCVa:324U21 sense TT | TTGAUGCUCUGGAGGGCCCCG | 1491 |
| | | | | siNA inv | | |
| 163 | GGAACCGGUGAGUACACCG | 53 | 28432 | HCVa:163U21 sense TT | UGCCACAUGAGUGGCCAAGG | 1492 |
| | | | | siNA inv | | |
| 294 | GUGGUACUGCCUGAUAGGG | 5 | 28433 | HCVa:294U21 sense TT | TTGGGAUAGUCCGUCAUGGUG | 1493 |
| | | | | siNA inv | | |
| 293 | UGUGGUACUGCCUGAUAGG | 2 | 28434 | HCVa:293U21 sense TT | TTGGAUAGUCCGUCAUGGUGU | 1494 |
| | | | | siNA inv | | |
| 292 | UUGUGGUACUGCCUGAUAG | 3 | 28435 | HCVa:292U21 sense TT | TTGAUAGUCCGUCAUGGUGUU | 1495 |
| | | | | siNA inv | | |
| 325 | UGCCCCGGGAGGUCUCGUAGACC | 1394 | 28436 | HCVa:343L21 antisense | TTGGGGCCCUCCAGAGCAUCU | 1496 |
| | | | | TT siNA (325C) inv | | |
| 162 | CGGAACCGGUGAGUACACC | 54 | 28437 | HCVa:180L21 antisense | TTGCCUUGGCCACUCAUGUGG | 1497 |
| | | | | TT siNA (162C) inv | | |
| 324 | GCCCCGGGAGGUCUCGUAG | 1 | 28438 | HCVa:342L21 antisense | TTCGGGGCCCUCCAGAGCAUC | 1498 |
| | | | | TT siNA (324C) inv | | |
| 163 | GGAACCGGUGAGUACACCG | 53 | 28439 | HCVa:181L21 antisense | UCCUUGGCCACUCAUGUGGC | 1499 |
| | | | | TT siNA (163C) inv | | |
| 294 | GUGGUACUGCCUGAUAGGG | 5 | 28440 | HCVa:312L21 antisense | TTCACCAUGACGGACUAUCCC | 1500 |
| | | | | TT siNA (294C) inv | | |
| 293 | UGUGGUACUGCCUGAUAGG | 2 | 28441 | HCVa:311L21 antisense | TTACACCAUGACGGACUAUCC | 1501 |
| | | | | TT siNA (293C) inv | | |
| 292 | UUGUGGUACUGCCUGAUAG | 3 | 28442 | HCVa:310L21 antisense | TTAACACCAUGACGGACUAUC | 1502 |
| | | | | TT siNA (292C) inv | | |
| 162 | UGCGGAACCGGUGAGUACACCGG | 1395 | 29573 | HCVa:162U21 sense siNA | CGGAACCGGUGAGUACACCGG | 1503 |
| 163 | GCGGAACCGGUGAGUACACCGGA | 1396 | 29574 | HCVa:163U21 sense siNA | GGAACCGGUGAGUACACCGGA | 1504 |
| 292 | CCUUGUGGUACUGCCUGAUAGGG | 1397 | 29575 | HCVa:292U21 sense siNA | UUGUGGUACUGCCUGAUAGGG | 1505 |
| 293 | CUUGUGGUACUGCCUGAUAGGGU | 1398 | 29576 | HCVa:293U21 sense siNA | UGUGGUACUGCCUGAUAGGGU | 1506 |
| 294 | UUGUGGUACUGCCUGAUAGGGUG | 1399 | 29577 | HCVa:294U21 sense siNA | GUGGUACUGCCUGAUAGGGUG | 1507 |
| 324 | GUGCCCCGGGAGGUCUCGUAGAC | 1400 | 29578 | HCVa:324U21 sense siNA | GCCCCGGGAGGUCUCGUAGAC | 1508 |
| 325 | UGCCCCGGGAGGUCUCGUAGACC | 1394 | 29579 | HCVa:325U21 sense siNA | CCCCGGGAGGUCUCGUAGACC | 1509 |
| 162 | UGCGGAACCGGUGAGUACACCGG | 1395 | 29580 | HCVa:180L21 antisense | GGUGUACUCACCGGUUCCGCA | 1510 |
| | | | | siNA (162C) | | |
| 163 | GCGGAACCGGUGAGUACACCGGA | 1396 | 29581 | HCVa:181L21 antisense | CGGUGUACUCACCGGUUCCGC | 1511 |
| | | | | siNA (163C) | | |
| 292 | CCUUGUGGUACUGCCUGAUAGGG | 1397 | 29582 | HCVa:310L21 antisense | CUAUCAGGCAGUACCACAAGG | 1512 |
| | | | | siNA (292C) | | |
| 293 | CUUGUGGUACUGCCUGAUAGGGU | 1398 | 29583 | HCVa:311L21 antisense | CCUAUCAGGCAGUACCACAAG | 1513 |
| | | | | siNA (293C) | | |
| 294 | UUGUGGUACUGCCUGAUAGGGUG | 1399 | 29584 | HCVa:312L21 antisense | CCCUAUCAGGCAGUACCACAA | 1514 |
| | | | | siNA (294C) | | |
| 324 | GUGCCCCGGGAGGUCUCGUAGAC | 1400 | 29585 | HCVa:342L21 antisense | CUACGAGACCUCCCGGGGCAC | 1515 |
| | | | | siNA (324C) | | |
| 325 | UGCCCCGGGAGGUCUCGUAGACC | 1394 | 29586 | HCVa:343L21 antisense | UCUACGAGACCUCCCGGGGCA | 1516 |
| | | | | siNA (325C) | | |
| 162 | UGCGGAACCGGUGAGUACACCGG | 1395 | 29587 | HCVa:162U21 sense | GGCCACAUGAGUGGCCAAGGC | 1517 |
| | | | | siNA inv | | |
| 163 | GCGGAACCGGUGAGUACACCGGA | 1396 | 29588 | HCVa:163U21 sense | AGGCCACAUGAGUGGCCAAGG | 1518 |
| | | | | siNA inv | | |
| 292 | CCUUGUGGUACUGCCUGAUAGGG | 1397 | 29589 | HCVa:292U21 sense | GGGAUAGUCCGUCAUGGUGUU | 1519 |
| | | | | siNA inv | | |
| 293 | CUUGUGGUACUGCCUGAUAGGGU | 1398 | 29590 | HCVa:293U21 sense | UGGGAUAGUCCGUCAUGGUGU | 1520 |
| | | | | siNA inv | | |
| 294 | UUGUGGUACUGCCUGAUAGGGUG | 1399 | 29591 | HCVa:294U21 sense | GUGGGAUAGUCCGUCAUGGUG | 1521 |
| | | | | siNA inv | | |
| 324 | GUGCCCCGGGAGGUCUCGUAGAC | 1400 | 29592 | HCVa:324U21 sense | CAGAUGCUCUGGAGGGCCCCG | 1522 |
| | | | | siNA inv | | |
| 325 | UGCCCCGGGAGGUCUCGUAGACC | 1394 | 29593 | HCVa:325U21 sense | CCAGAUGCUCUGGAGGGCCCC | 1523 |
| | | | | siNA inv | | |
| 162 | UGCGGAACCGGUGAGUACACCGG | 1395 | 29594 | HCVa:180L21 antisense | ACGCCUUGGCCACUCAUGUGG | 1524 |
| | | | | siNA (162C) inv | | |
| 163 | GCGGAACCGGUGAGUACACCGGA | 1396 | 29595 | HCVa:181L21 antisense | CGCCUUGGCCACUCAUGUGGC | 1525 |
| | | | | siNA (163C) inv | | |
| 292 | CCUUGUGGUACUGCCUGAUAGGG | 1397 | 29596 | HCVa:310L21 antisense | GGAACACCAUGACGGACUAUC | 1526 |
| | | | | siNA (292C) inv | | |
| 293 | CUUGUGGUACUGCCUGAUAGGGU | 1398 | 29597 | HCVa:311L21 antisense | GAACACCAUGACGGACUAUCC | 1527 |
| | | | | siNA (293C) inv | | |
| 294 | UUGUGGUACUGCCUGAUAGGGUG | 1399 | 29598 | HCVa:312L21 antisense | AACACCAUGACGGACUAUCCC | 1528 |
| | | | | siNA (294C) inv | | |
| 324 | GUGCCCCGGGAGGUCUCGUAGAC | 1400 | 29599 | HCVa:342L21 antisense | CACGGGGCCCUCCAGAGCAUC | 1529 |
| | | | | siNA (324C) inv | | |
| 325 | UGCCCCGGGAGGUCUCGUAGACC | 1394 | 29600 | HCVa:343121 antisense | ACGGGGCCCUCCAGAGCAUCU | 1530 |
| | | | | siNA (325C) inv | | |
| 325 | UGCCCCGGGAGGUCUCGUAGACC | 1394 | 30051 | HCVa:325U21 sense | BCsCsCsCsGsGGAGG | 1531 |
| | | | | siNA 5 5′ P=S +3′ | UCUCGUAGAXXB | |
| | | | | univ. base 2 + 5′/3′ invAba | | |
| 325 | UGCCCCGGGAGGUCUCGUAGACC | 1394 | 30052 | HCVa:325U21 sense | BAsGsAsUsGsCUCU | 1532 |
| | | | | siNA inv 5 5′ P=S + 3′ | GGAGGGCCCCXXB | |
| | | | | univ. base 2 + 5′/3′ invAba | | |
| 325 | UGCCCCGGGAGGUCUCGUAGACC | 1394 | 30053 | HCVa:343L21 antisense | UsCsUsAsCsGAGACC | 1533 |
| | | | | siNA (325C) 5 5′ P=S + 3′ | UCCCGGGGXXB | |
| | | | | univ. base 2 + 3′ invAba | | |
| 325 | UGCCCCGGGAGGUCUCGUAGACC | 1394 | 30054 | HCVa:343L21 antisense | GsGsGsGsCsCCUCCA | 1534 |
| | | | | siNA (325C) inv 5 5′ P=S + | GAGCAUCUXXB | |
| | | | | 3′ univ. base 2 + 3′ | | |
| | | | | invAba | | |
| 325 | UGCCCCGGGAGGUCUCGUAGACC | 1394 | 30055 | HCVa:325U21 sense | BCsCsCsCsGGGAGGUs | 1535 |
| | | | | siNA all Y P=S + 3′ | CsUsCsGUsAGAXXB | |
| | | | | univ. base 2 + 5′/3′ invAba | | |
| 325 | UGCCCCGGGAGGUCUCGUAGACC | 1394 | 30056 | HCVa:325U21 sense | BAGAUsGCsUsCsUs | 1536 |
| | | | | siNA inv all Y P=S + 3′ | GGAGGGCsCsCsCsXXB | |
| | | | | univ. base 2 + 5′/3′ | | |
| | | | | invAba | | |
| 325 | UGCCCCGGGAGGUCUCGUAGACC | 1394 | 30057 | HCVa:343L21 antisense | UsCsUsACsGAGACsCsUs | 1537 |
| | | | | siNA (325C) all Y P=S + | CsCsCsGGGGXXB | |
| | | | | 3′ univ. base 2 + 3′ | | |
| | | | | invAba | | |
| 325 | UGCCCCGGGAGGUCUCGUAGACC | 1394 | 30058 | HCVa:343L21 antisense | GGGGCsCsCsUsCsCsAGAGCs | 1538 |
| | | | | siNA (325C) inv all Y | AUsCsUsXXB | |
| | | | | P=S + 3′ univ. | | |
| | | | | base 2 + 3′ invAba | | |
| 325 | UGCCCCGGGAGGUCUCGUAGACC | 1394 | 30059 | HCVa:325U21 sense siNA | BcscscscsGGGAGGucuc | 1539 |
| | | | | 4/3 P=S ends + all | GuAsGsAsXXB | |
| | | | | Y-2′F + 3′ univ. | | |
| | | | | base 2 + 5′/3′ invAba | | |
| 325 | UGCCCCGGGAGGUCUCGUAGACC | 1394 | 30060 | HCVa:325U21 sense siNA | BAsGsAsusGcucuGGAGGG | 1540 |
| | | | | inv 4/3 P=S ends + all | ccscscsXXB | |
| | | | | Y-2′F + 3′ univ. | | |
| | | | | base 2 + 5′/3′ invAba | | |
| 325 | UGCCCCGGGAGGUCUCGUAGACC | 1394 | 30170 | HCVa:325U21 sense siNA | B ccccGGGAGGucucGuAGAXX B | 1541 |
| | | | | all Y-2′F + 3′ univ. | | |
| | | | | base 2 + 5′/3′ invAba | | |
| 325 | UGCCCCGGGAGGUCUCGUAGACC | 1394 | 30171 | HCVa:325U21 sense siNA | B AGAuGcucuGGAGGGccccXX B | 1542 |
| | | | | inv all Y-2′F + 3′ univ. | | |
| | | | | base 2 + 5′/3′ invAba | | |
| 325 | UGCCCCGGGAGGUCUCGUAGACC | 1394 | 30172 | HCVa:343L21 antisense | B UsCsUsACsGAGACsCsUs | 1543 |
| | | | | siNA (325C) all Y P=S + | CsCsCsGGGGXX B | |
| | | | | 3′ univ. base 2 + 5′/3′ | | |
| | | | | invAba | | |
| 325 | UGCCCCGGGAGGUCUCGUAGACC | 1394 | 30173 | HCVa:343L19 antisense | ucuAcGAGAccucccGGGG | 1544 |
| | | | | siNA (325C) all Y-2′F | | |
| 325 | UGCCCCGGGAGGUCUCGUAGACC | 1394 | 30175 | HCVa:343L21 antisense | ucuAcGAGAccucccGGGGXX | 1545 |
| | | | | siNA (325C) all Y-2′F + | | |
| | | | | 3′ univ. Base 2 | | |
| 325 | UGCCCCGGGAGGUCUCGUAGACC | 1394 | 30176 | HCVa:343L21 antisense | GGGGcccuccAGAGcAucuXX | 1546 |
| | | | | siNA (325C) inv all | | |
| | | | | Y-2′F + 3′ | | |
| | | | | univ. Base 2 | | |
| 325 | UGCCCCGGGAGGUCUCGUAGACC | 1394 | 30177 | HCVa:343L21 antisense | B ucuAcGAGAccucccGGGGXX B | 1547 |
| | | | | siNA (325C) all Y- | | |
| | | | | 2′F + 3′ | | |
| | | | | univ. Base 2 + | | |
| | | | | 5′/3′ iB | | |
| 325 | UGCCCCGGGAGGUCUCGUAGACC | 1394 | 30178 | HCVa:325U21 sense | CsCsCsCsGGGAGGUsCs | 1548 |
| | | | | siNA all Y P=S + | UsCsGUsAGAXX B | |
| | | | | 3′ univ. base 2 + | | |
| | | | | 3′ invAba | | |
| 325 | UGCCCCGGGAGGUCUCGUAGACC | 1394 | 30417 | HCVa:325U21 sense | CCCCGGGAGGUCUCGUAGACC B | 1549 |
| | | | | siNA w/iB | | |
| 325 | UGCCCCGGGAGGUCUCGUAGACC | 1394 | 30418 | HCVa:325U21 sense | B CCCCGGGAGGUCUCGUAGACC B | 1550 |
| | | | | siNA w/iB | | |
| 325 | UGCCCCGGGAGGUCUCGUAGACC | 1394 | 30419 | HCVa:343L21 antisense | UCUACGAGACCUCCCGGGGCA B | 1551 |
| | | | | siNA (325C) w/iB | | |
| 325 | UGCCCCGGGAGGUCUCGUAGACC | 1394 | 30420 | HCVa:343L21 antisense | B UCUACGAGACCUCCCGGGGCA B | 1552 |
| | | | | siNA (325C) w/iB | | |
| 325 | UGCCCCGGGAGGUCUCGUAGACC | 1394 | 30561 | HCVa :325U21 sense | B ccccGGGAGGucucGuAGATT B | 1553 |
| | | | | siNA Y-2′Ome (stab06) + | | |
| | | | | 5′/3′ invAba | | |
| 325 | UGCCCCGGGAGGUCUCGUAGACC | 1394 | 30562 | HCVa:343L21 antisense | ucuAcGAGAccucccGGGGTsT | 1554 |
| | | | | siNA (325C) Y-2′F, | | |
| | | | | R-2′Ome + TsT | | |
| 153 | AUAGUGGUCUGCGGAACCGGUGA | 1401 | 30649 | HCVa:153U21 sense | B AGuGGucuGcGGAAccGGuTT B | 1555 |
| | | | | siNA stab07 | | |
| 159 | GUCUGCGGAACCGGUGAGUACAC | 1402 | 30650 | HCVa:159U21 sense | B cuGcGGAAccGGuGAGuAcTT B | 1556 |
| | | | | siNA stab07 | | |
| 291 | GCCUUGUGGUACUGCCUGAUAGG | 1403 | 30651 | HCVa:291U21 sense | B cuuGuGGuKAcuGccuGAuATT B | 1557 |
| | | | | siNA stab07 | | |
| 295 | UGUGGUACUGCCUGAUAGGGUGC | 1404 | 30652 | HCVa:295U21 sense | B uGGuAcuGccuGAuAGGGuTT B | 1558 |
| | | | | siNA stab07 | | |
| 296 | GUGGUACUGCCUGAUAGGGUGCU | 1405 | 30653 | HCVa:296U21 sense | B GGuAcuGccuGAuAGGGuGTT B | 1559 |
| | | | | siNA stab07 | | |
| 297 | UGGUACUGCCUGAUAGGGUGCUU | 1406 | 30654 | HCVa:297U21 sense | B GuAcuGccuGAuAGGGuGcTT B | 1560 |
| | | | | siNA stab07 | | |
| 298 | GGUACUGCCUGAUAGGGUGCUUG | 1407 | 30655 | HCVa:298U21 sense | B uAcuGccuGAuAGGGuGcuTT B | 1561 |
| | | | | siNA stab07 | | |
| 300 | UACUGCCUGAUAGGGUGCUUGCG | 1408 | 30656 | HCVa:300U21 sense | B cuGccuGAuAGGGuGcuuGTT B | 1562 |
| | | | | siNA stab07 | | |
| 301 | ACUGCCUGAUAGGGUGCUUGCGA | 1409 | 30657 | HCVa:301U21 sense | B uGccuGAuAGGGuGcuuGcTT B | 1563 |
| | | | | siNA stab07 | | |
| 303 | UGCCUGAUAGGGUGCUUGCGAGU | 1410 | 30658 | HCVa:303U21 sense | B ccuGAuAGGGuGcuuGcGATT B | 1564 |
| | | | | siNA stab07 | | |
| 306 | CUGAUAGGGUGCUUGCGAGUGCC | 1411 | 30659 | HCVa:306U21 sense | B GAuAGGGuGcuuGcGAGuGTT B | 1565 |
| | | | | siNA stab07 | | |
| 324 | GUGCCCCGGGAGGUCUCGUAGAC | 1400 | 30660 | HCVa:324U21 sense | B GccccGGGAGGucucGuAGTT B | 1566 |
| | | | | siNA stab07 | | |
| 153 | AUAGUGGUCUGCGGAACCGGUGA | 1401 | 30661 | HCVa:171L21 antisense | AccGGuuccGcAGAccAcuTsT | 1567 |
| | | | | siNA (153C) stab08 | | |
| 159 | GUCUGCGGAACCGGUGAGUACAC | 1402 | 30662 | HCVa:177L21 antisense | GuAcucAccGGuuccGcAGTsT | 1568 |
| | | | | siNA (159C) stab08 | | |
| 291 | GCCUUGUGGUACUGCCUGAUAGG | 1403 | 30663 | HCVa:309121 antisense | uAucAGGcAGuAccAcAAGTsT | 1569 |
| | | | | siNA (291C) stab08 | | |
| 295 | UGUGGUACUGCCUGAUAGGGUGC | 1404 | 30664 | HCVa:313L21 antisense | AcccuAucAGGcAGuAccATsT | 1570 |
| | | | | siNA (295C) stab08 | | |
| 296 | GUGGUACUGCCUGAUAGGGUGCU | 1405 | 30665 | HCVa:314121 antisense | cAcccuAucAGGcAGuAccTsT | 1571 |
| | | | | siNA (296C) stab08 | | |
| 297 | UGGUACUGCCUGAUAGGGUGCUU | 1406 | 30666 | HCVa:315L21 antisense | GcAcccuAucAGGcAGuAcTsT | 1572 |
| | | | | siNA (297C) stab08 | | |
| 298 | GGUACUGCCUGAUAGGGUGCUUG | 1407 | 30667 | HCVa:316L21 antisense | AGcAcccuAucAGGcAGuATsT | 1573 |
| | | | | siNA (298C) stab08 | | |
| 300 | UACUGCCUGAUAGGGUGCUUGCG | 1408 | 30668 | HCVa:318121 antisense | cAAGcAcccuAucAGGcAGTsT | 1574 |
| | | | | siNA (300C) stab08 | | |
| 301 | ACUGCCUGAUAGGGUGCUUGCGA | 1409 | 30669 | HCVa:319L21 antisense | GcAAGcAcccuAucAGGcATsT | 1575 |
| | | | | siNA (301C) stab08 | | |
| 303 | UGCCUGAUAGGGUGCUUGCGAGU | 1410 | 30670 | HCVa:321121 antisense | ucGcAAGcAcccuAucAGGTsT | 1576 |
| | | | | siNA (303C) stab08 | | |
| 306 | CUGAUAGGGUGCUUGCGAGUGCC | 1411 | 30671 | HCVa:324L21 antisense | cAcucGcAAGcAcccuAucTsT | 1577 |
| | | | | siNA (306C) stab08 | | |
| 324 | GUGCCCCGGGAGGUCUCGUAGAC | 1400 | 30672 | HCVa:342121 antisense | cuAcGAGAccucccGGGGcTsT | 1578 |
| | | | | siNA (324C) stab08 | | |
| 153 | AUAGUGGUCUGCGGAACCGGUGA | 1401 | 30673 | HCVa:153U21 sense | B uGGCcAAGGcGucuGGuGATT B | 1579 |
| | | | | siNA stab07 inv | | |
| 159 | GUCUGCGGAACCGGUGAGUACAC | 1402 | 30674 | HCVa:159U21 sense | B cAuGAGuGGccAAGGcGucTT B | 1580 |
| | | | | siNA stab07 inv | | |
| 291 | GCCUUGUGGUACUGCCUGAUAGG | 1403 | 30675 | HCVa:291U21 sense | B AuAGuccGucAuGGuGuucTT B | 1581 |
| | | | | siNA stab07 inv | | |
| 295 | UGUGGUACUGCCUGAUAGGGUGC | 1404 | 30676 | HCVa:295U21 sense | B uGGGAuAGuccGucAuGGuTT B | 1582 |
| | | | | siNA stab07 inv | | |
| 296 | GUGGUACUGCCUGAUAGGGUGCU | 1405 | 30677 | HCVa:296U21 sense | B GuGGGAuAGuccGucAuGGTT B | 1583 |
| | | | | siNA stab07 inv | | |
| 297 | UGGUACUGCCUGAUAGGGUGCUU | 1406 | 30678 | HCVa:297U21 sense | B CGuGGGAuAGuccGucAuGTT B | 1584 |
| | | | | siNA stab07 inv | | |
| 298 | GGUACUGCCUGAUAGGGUGCUUG | 1407 | 30679 | HCVa:298U21 sense | B ucGuGGGAuAGuccGucAuTT B | 1585 |
| | | | | siNA stab07 inv | | |
| 300 | UACUGCCUGAUAGGGUGCUUGCG | 1408 | 30680 | HCVa:300U21 sense | B GuuCGuGGGAuAGuccGucTT B | 1586 |
| | | | | siNA stab07 inv | | |
| 301 | ACUGCCUGAUAGGGUGCUUGCGA | 1409 | 30681 | HCVa:301U21 sense | B cGuucGuGGGAuAGuccGuTT B | 1587 |
| | | | | siNA stab07 inv | | |
| 303 | UGCCUGAUAGGGUGCUUGCGAGU | 1410 | 30682 | HCVa:303U21 sense | B AGCGuucGuGGGAuAGuccTT B | 1588 |
| | | | | siNA stab07 inv | | |
| 306 | CUGAUAGGGUGCUUGCGAGUGCC | 1411 | 30683 | HCVa:306U21 sense | B GuGAGcGuucGuGGGAuAGTT B | 1589 |
| | | | | siNA stab07 inv | | |
| 324 | GUGCCCCGGGAGGUCUCGUAGAC | 1400 | 30684 | HCVa:324U21 sense | B GAuGcucuGGAGGGccccGTT B | 1590 |
| | | | | siNA stab07 inv | | |
| 153 | AUAGUGGUCUGCGGAACCGGUGA | 1401 | 30685 | HCVa:171L21 antisense | ucAccAGAcGccuuGGccATsT | 1591 |
| | | | | siNA (153C) stab08 inv | | |
| 159 | GUCUGCGGAACCGGUGAGUACAC | 1402 | 30686 | HCVa:177L21 antisense | GacGccuuGGccAcucAuGTsT | 1592 |
| | | | | siNA (159C) stab08 inv | | |
| 291 | GCCUUGUGGUACUGCCUGAUAGG | 1403 | 30687 | HCVa:309L21 antisense | GAAcACcAuGACGGAcuAuTsT | 1593 |
| | | | | siNA (291C) stab08 inv | | |
| 295 | UGUGGUACUGCCUGAUAGGGUGC | 1404 | 30688 | HCVa:313L21 antisense | AccAuGAcGGAcuAucccATsT | 1594 |
| | | | | siNA (295C) stab08 inv | | |
| 296 | GUGGUACUGCCUGAUAGGGUGCU | 1405 | 30689 | HCVa:314L21 antisense | ccAuGAcGGAcuAucccAcTsT | 1595 |
| | | | | siNA (296C) stab08 inv | | |
| 297 | UGGUACUGCCUGAUAGGGUGCUU | 1406 | 30690 | HCVa:315L21 antisense | cAuGAcGGAcuAucccAcGTsT | 1596 |
| | | | | siNA (297C) stab08 inv | | |
| 298 | GGUACUGCCUGAUAGGGUGCUUG | 1407 | 30691 | HCVa:316L21 antisense | AuGAcGGAcuAucccAcGATsT | 1597 |
| | | | | siNA (298C) stab08 inv | | |
| 300 | UACUGCCUGAUAGGGUGCUUGCG | 1408 | 30692 | HCVa:318L21 antisense | GAcGGAcuAucccAcGAAcTsT | 1598 |
| | | | | siNA (300C) stab08 inv | | |
| 301 | ACUGCCUGAUAGGGUGCUUGCGA | 1409 | 30693 | HCVa:319L21 antisense | AcGGACuAucccAcGAAcGTsT | 1599 |
| | | | | siNA (301C) stab08 inv | | |
| 303 | UGCCUGAUAGGGUGCUUGCGAGU | 1410 | 30694 | HCVa:321L21 antisense | GGAcuAucccAcGAAcGcuTsT | 1600 |
| | | | | siNA (303C) stab08 inv | | |
| 306 | CUGAUAGGGUGCUUGCGAGUGCC | 1411 | 30695 | HCVa:324L21 antisense | cuAucccAcGAAcGcucAcTsT | 1601 |
| | | | | siNA (306C) stab08 inv | | |
| 324 | GUGCCCCGGGAGGUCUCGUAGAC | 1400 | 30696 | HCVa:342L21 antisense | cGGGGcccuccAGAGcAucTsT | 1602 |
| | | | | siNA (324C) stab08 inv | | |
| 325 | UGCCCCGGGAGGUCUCGUAGACC | 1394 | 31340 | HCVa:325U21 sense | B ccccGGGAGGucucGuAGATT B | 1603 |
| | | | | siNA stab04 | | |
| 325 | UGCCCCGGGAGGUCUCGUAGACC | 1394 | 31341 | HCVa:325U21 sense | B AGAuGcucuGGAGGGccccTT B | 1604 |
| | | | | siNA inv stab04 | | |
| 325 | UGCCCCGGGAGGUCUCGUAGACC | 1394 | 31342 | HCVa:343L21 antisense | ucuAcGAGAccucccGGGGTsT | 1605 |
| | | | | siNA (325C) stab05 | | |
| 325 | UGCCCCGGGAGGUCUCGUAGACC | 1394 | 31343 | HCVa:343L21 antisense | GGGGcccuccAGAGcAucuTsT | 1606 |
| | | | | siNA (325C) inv stab05 | | |
| 325 | UGCCCCGGGAGGUCUCGUAGACC | 1394 | 31344 | HCVa:325U21 sense | B ccccGGGAGGucucGuAGATT B | 1607 |
| | | | | siNA stab07 | | |
| 325 | UGCCCCGGGAGGUCUCGUAGACC | 1394 | 31345 | HCVa:325U21 sense | B AGAuGcuCuGGAGGGccccTT B | 1608 |
| | | | | siNA inv stab07 | | |
| 325 | UGCCCCGGGAGGUCUCGUAGACC | 1394 | 31346 | HCVa:343L21 antisense | GGGGcccuccAGAGcAucuTsT | 1609 |
| | | | | siNA (325C) inv stab08 | | |
| 325 | UGCCCCGGGAGGUCUCGUAGACC | 1394 | 31347 | HCVa:343L21 antisense | ucuAcGAGAccucccGGGGTsT | 1610 |
| | | | | siNA (325C) stab11 | | |
| 325 | UGCCCCGGGAGGUCUCGUAGACC | 1394 | 31348 | HCVa:343L21 antisense | GGGGcccuccAGAGcAucuTsT | 1611 |
| | | | | siNA (325C) inv stab11 | | |
| 153 | AUAGUGGUCUGCGGAACCGGUGA | 1401 | 31453 | HCVa:153U21 sense | B AGuGGucuGcGGAAccGGuTT B | 1612 |
| | | | | siNA stab04 | | |
| 159 | GUCUGCGGAACCGGUGAGUACAC | 1402 | 31454 | HCVa:159U21 sense | B CuGcGGAAccGGuGAGuAcTT B | 1613 |
| | | | | siNA stab04 | | |
| 287 | AAAGGCCUUGUGGUACUGCCUGA | 1412 | 31455 | HCVa:287U21 sense | B AGGccuuGuGGuAcuGccuTT B | 1614 |
| | | | | siNA stab04 | | |
| 291 | GCCUUGUGGUACUGCCUGAUAGG | 1403 | 31456 | HCVa:291U21 sense | B cuuGuGGuAcuGccuGAuATT B | 1615 |
| | | | | siNA stab04 | | |
| 295 | UGUGGUACUGCCUGAUAGGGUGC | 1404 | 31457 | HCVa:295U21 sense | B uGGuACuGccuGAuAGGGuTT B | 1616 |
| | | | | siNA stab04 | | |
| 296 | GUGGUACUGCCUGAUAGGGUGCU | 1405 | 31458 | HCVa:296U21 sense | B GGuAcuGccuGAuAGGGuGTT B | 1617 |
| | | | | siNA stab04 | | |
| 297 | UGGUACUGCCUGAUAGGGUGCUU | 1406 | 31459 | HCVa:297U21 sense | B GuAcuGCcuGAuAGGGuGcTT B | 1618 |
| | | | | siNA stab04 | | |
| 298 | GGUACUGCCUGAUAGGGUGCUUG | 1407 | 31460 | HCVa:298U21 sense | B uAcuGccuGAuAGGGuGcuTT B | 1619 |
| | | | | siNA stab04 | | |
| 300 | UACUGCCUGAUAGGGUGCUUGCG | 1408 | 31461 | HCVa:300U21 sense | B cuGccuGAuAGGGuGcuuGTT B | 1620 |
| | | | | siNA stab04 | | |
| 301 | ACUGCCUGAUAGGGUGCUUGCGA | 1409 | 31462 | HCVa:301U21 sense | B uGccuGAuAGGGuGcuuGcTT B | 1621 |
| | | | | siNA stab04 | | |
| 303 | UGCCUGAUAGGGUGCUUGCGAGU | 1410 | 31463 | HCVa:303U21 sense | B ccuGAuAGGGuGcuuGcGATT B | 1622 |
| | | | | siNA stab04 | | |
| 306 | CUGAUAGGGUGCUUGCGAGUGCC | 1411 | 31464 | HCVa:306U21 sense | B GAuAGGGuGcuuGcGAGuGTT B | 1623 |
| | | | | siNA stab04 | | |
| 153 | AUAGUGGUCUGCGGAACCGGUGA | 1401 | 31465 | HCVa:171L21 antisense | AccGGuuccGcAGAccAcuTsT | 1624 |
| | | | | siNA (153C) stab05 | | |
| 159 | GUCUGCGGAACCGGUGAGUACAC | 1402 | 31466 | HCVa:177L21 antisense | GuAcucAccGGuuccGcAGTsT | 1625 |
| | | | | siNA (159C) stab05 | | |
| 287 | AAAGGCCUUGUGGUACUGCCUGA | 1412 | 31467 | HCVa:305L21 antisense | AGGcAGuAccAcAAGGccuTsT | 1626 |
| | | | | siNA (287C) stab05 | | |
| 291 | GCCUUGUGGUACUGCCUGAUAGG | 1403 | 31468 | HCVa:309L21 antisense | uAuCAGGcAGuAccAcAAGTsT | 1627 |
| | | | | siNA (291C) stab05 | | |
| 295 | UGUGGUACUGCCUGAUAGGGUGC | 1404 | 31469 | HCVa:313L21 antisense | AcccuAucAGGcAGuAccATsT | 1628 |
| | | | | siNA (295C) stab05 | | |
| 296 | GUGGUACUGCCUGAUAGGGUGCU | 1405 | 31470 | HCVa:314121 antisense | cAcccuAucAGGcAGuAccTsT | 1629 |
| | | | | siNA (296C) stab05 | | |
| 297 | UGGUACUGCCUGAUAGGGUGCUU | 1406 | 31471 | HCVa:315L21 antisense | GcAcccuAucAGGcAGuAcTsT | 1630 |
| | | | | siNA (297C) stab05 | | |
| 298 | GGUACUGCCUGAUAGGGUGCUUG | 1407 | 31472 | HCVa:316121 antisense | AGcACccuAucAGGcAGuATsT | 1631 |
| | | | | siNA (298C) stab05 | | |
| 300 | UACUGCCUGAUAGGGUGCUUGCG | 1408 | 31473 | HCVa:318L21 antisense | cAAGcAcccuAucAGGcAGTsT | 1632 |
| | | | | siNA (300C) stab05 | | |
| 301 | ACUGCCUGAUAGGGUGCUUGCGA | 1409 | 31474 | HCVa:319121 antisense | GcAAGcACccuAucAGGcATsT | 1633 |
| | | | | siNA (301C) stab05 | | |
| 303 | UGCCUGAUAGGGUGCUUGCGAGU | 1410 | 31475 | HCVa:321121 antisense | ucGcAAGcAcccuAucAGGTsT | 1634 |
| | | | | siNA (303C) stab05 | | |
| 306 | CUGAUAGGGUGCUUGCGAGUGCC | 1411 | 31476 | HCVa:324121 antisense | cAcucGcAAGcAcccuAucTsT | 1635 |
| | | | | siNA (306C) stab05 | | |
| 153 | AUAGUGGUCUGCGGAACCGGUGA | 1401 | 31477 | HCVa:153U21 sense | B uGGccAAGGCGuCuGGuGATT B | 1636 |
| | | | | siNA inv stab04 | | |
| 159 | GUCUGCGGAACCGGUGAGUACAC | 1402 | 31478 | HCVa:159U21 sense | B cAuGAGuGGccAAGGcGucTT B | 1637 |
| | | | | siNA inv stab04 | | |
| 287 | AAAGGCCUUGUGGUACUGCCUGA | 1412 | 31479 | HCVa:287U21 sense | B uccGucAuGGuGuuccGGATT B | 1638 |
| | | | | siNA inv stab04 | | |
| 291 | GCCUUGUGGUACUGCCUGAUAGG | 1403 | 31480 | HCVa:291U21 sense | B AuAGuccGucAuGGuGuucTT B | 1639 |
| | | | | siNA inv stab04 | | |
| 295 | UGUGGUACUGCCUGAUAGGGUGC | 1404 | 31481 | HCVa:295U21 sense | B uGGGAuAGuccGucAuGGuTT B | 1640 |
| | | | | siNA inv stab04 | | |
| 296 | GUGGUACUGCCUGAUAGGGUGCU | 1405 | 31482 | HCVa:296U21 sense | B GuGGGAuAGuccGucAuGGTT B | 1641 |
| | | | | siNA inv stab04 | | |
| 297 | UGGUACUGCCUGAUAGGGUGCUU | 1406 | 31483 | HCVa:297U21 sense | B cGuGGGAuAGuccGucAuGTT B | 1642 |
| | | | | siNA inv stab04 | | |
| 298 | GGUACUGCCUGAUAGGGUGCUUG | 1407 | 31484 | HCVa:298U21 sense | B ucGuGGGAuAGuCcGucAuTT B | 1643 |
| | | | | siNA inv stab04 | | |
| 300 | UACUGCCUGAUAGGGUGCUUGCG | 1408 | 31485 | HCVa:300U21 sense | B GuucGuGGGAuAGuccGucTT B | 1644 |
| | | | | siNA inv stab04 | | |
| 301 | ACUGCCUGAUAGGGUGCUUGCGA | 1409 | 31486 | HCVa:301U21 sense | B cGuucGuGGGAuAGuccGuTT B | 1645 |
| | | | | siNA inv stab04 | | |
| 303 | UGCCUGAUAGGGUGCUUGCGAGU | 1410 | 31487 | HCVa:303U21 sense | B AGcGuucGuGGGAuAGuccTT B | 1646 |
| | | | | siNA inv stab04 | | |
| 306 | CUGAUAGGGUGCUUGCGAGUGCC | 1411 | 31488 | HCVa:306U21 sense | B GuGAGcGuuCGuGGGAuAGTT B | 1647 |
| | | | | siNA inv stab04 | | |
| 153 | AUAGUGGUCUGCGGAACCGGUGA | 1401 | 31489 | HCVa:171L21 antisense | ucAccAGAcGccuuGGccATsT | 1648 |
| | | | | siNA (153C) inv stab05 | | |
| 159 | GUCUGCGGAACCGGUGAGUACAC | 1402 | 31490 | HCVa:177L21 antisense | GacGccuuGGccAcucAuGTsT | 1649 |
| | | | | siNA (159C) inv stab05 | | |
| 287 | AAAGGCCUUGUGGUACUGCCUGA | 1412 | 31491 | HCVa:305L21 antisense | uccGGAAcAccAuGAcGGATsT | 1650 |
| | | | | siNA (287C) inv stab05 | | |
| 291 | GCCUUGUGGUACUGCCUGAUAGG | 1403 | 31492 | HCVa:309L21 antisense | GAAcAcCAuGACGGAcuAuTsT | 1651 |
| | | | | siNA (291C) inv stab05 | | |
| 295 | UGUGGUACUGCCUGAUAGGGUGC | 1404 | 31493 | HCVa:313L21 antisense | AccAuGAcGGAcuAucccATsT | 1652 |
| | | | | siNA (295C) inv stab05 | | |
| 296 | GUGGUACUGCCUGAUAGGGUGCU | 1405 | 31494 | HCVa:314L21 antisense | ccAuGAcGGAcuAucccAcTsT | 1653 |
| | | | | siNA (296C) inv stab05 | | |
| 297 | UGGUACUGCCUGAUAGGGUGCUU | 1406 | 31495 | HCVa:315L21 antisense | cAuGAcGGAcuAucccAcGTsT | 1654 |
| | | | | siNA (297C) inv stab05 | | |
| 298 | GGUACUGCCUGAUAGGGUGCUUG | 1407 | 31496 | HCVa:316L21 antisense | AuGAcGGAcuAucccAcGATsT | 1655 |
| | | | | siNA (298C) inv stab05 | | |
| 300 | UACUGCCUGAUAGGGUGCUUGCG | 1408 | 31497 | HCVa:318L21 antisense | GACGGAcuAucccAcGAAcTsT | 1656 |
| | | | | siNA (300C) inv stab05 | | |
| 301 | ACUGCCUGAUAGGGUGCUUGCGA | 1409 | 31498 | HCVa:319L21 antisense | ACGGAcuAucccAcGAAcGTsT | 1657 |
| | | | | siNA (301C) inv stab05 | | |
| 303 | UGCCUGAUAGGGUGCUUGCGAGU | 1410 | 31499 | HCVa:321L21 antisense | GGAcuAucccAcGAAcGcuTsT | 1658 |
| | | | | siNA (303C) inv stab05 | | |
| 306 | CUGAUAGGGUGCUUGCGAGUGCC | 1411 | 31500 | HCVa:324L21 antisense | cuAucccAcGAAcGcucAcTsT | 1659 |
| | | | | siNA (306C) inv stab05 | | |
| 190 | GGGUCCUUUCUUGGAUCAACCCG | 1413 | 31659 | HCVb:190U21 sense siNA | B GuccuuucuuGGAucAAccTT B | 1660 |
| | | | | stab04 | | |
| 191 | GGUCCUUUCUUGGAUCAACCCGC | 1393 | 31660 | HCVb:191U21 sense siNA | B uccuuucuuGGAucAAcccTT B | 1661 |
| | | | | stab04 | | |
| 189 | CGGGUCCUUUCUUGGAUCAACCC | 1414 | 31661 | HCVb:189U21 sense siNA | B GGuccuuucuuGGAucAAcTT B | 1662 |
| | | | | stab04 | | |
| 186 | GACCGGGUCCUUUCUUGGAUCAA | 1415 | 31662 | HCVb:186U21 sense siNA | B ccGGGuccuuucuuGGAucTT B | 1663 |
| | | | | stab04 | | |
| 190 | GGGUCCUUUCUUGGAUCAACCCG | 1413 | 31663 | HCVb:208L21 antisense | GGuuGAuCcAAGAAAGGAcTsT | 1664 |
| | | | | siNA (190C) stab05 | | |
| 191 | GGUCCUUUCUUGGAUCAACCCGC | 1393 | 31664 | HCVb:209L21 antisense | GGGuuGAuccAAGAAAGGATsT | 1665 |
| | | | | siNA (191C) stab05 | | |
| 189 | CGGGUCCUUUCUUGGAUCAACCC | 1414 | 31665 | HCVb:207L21 antisense | GuuGAuccAAGAAAGGAccTsT | 1666 |
| | | | | siNA (189C) stab05 | | |
| 186 | GACCGGGUCCUUUCUUGGAUCAA | 1415 | 31666 | HCVb:204L21 antisense | GAuCCAAGAAAGGAcccGGTsT | 1667 |
| | | | | siNA (186C) stab05 | | |
| 190 | GGGUCCUUUCUUGGAUCAACCCG | 1413 | 31667 | HCVb:190U21 sense siNA | B ccAAcuAGGuucuuuccuGTT B | 1668 |
| | | | | inv stab04 | | |
| 191 | GGUCCUUUCUUGGAUCAACCCGC | 1393 | 31668 | HCVb:191U21 sense siNA | B cccAAcuAGGuucuuuccuTT B | 1669 |
| | | | | inv stab04 | | |
| 189 | CGGGUCCUUUCUUGGAUCAACCC | 1414 | 31669 | HCVb:189U21 sense siNA | B cAAcuAGGuucuuuccuGGTT B | 1670 |
| | | | | inv stab04 | | |
| 186 | GACCGGGUCCUUUCUUGGAUCAA | 1415 | 31670 | HCVb:186U21 sense siNA | B cuAGGuucuuuccuGGGccTT B | 1671 |
| | | | | inv stab04 | | |
| 190 | GGGUCCUUUCUUGGAUCAACCCG | 1413 | 31671 | HCVb:208L21 antisense | cAGGAAAGAAccuAGuuGGTsT | 1672 |
| | | | | siNA (190C) inv stab05 | | |
| 191 | GGUCCUUUCUUGGAUCAACCCGC | 1393 | 31672 | HCVb:209L21 antisense | AGGAAAGAAccuAGuuGGGTsT | 1673 |
| | | | | siNA (191C) inv stab05 | | |
| 189 | CGGGUCCUUUCUUGGAUCAACCC | 1414 | 31673 | HCVb:207L21 antisense | ccAGGAAAGAAccuAGuuGTsT | 1674 |
| | | | | siNA (189C) inv stab05 | | |
| 186 | GACCGGGUCCUUUCUUGGAUCAA | 1415 | 31674 | HCVb:204L21 antisense | GGcccAGGAAAGAAccuAGTsT | 1675 |
| | | | | siNA (186C) inv stab05 | | |
| 326 | GCCCCGGGAGGUCUCGUAGACCG | 1416 | 31702 | HCVa:326U21 sense siNA | B cccGGGAGGucucGuAGAcTT B | 1676 |
| | | | | stab07 | | |
| 327 | CCCCGGGAGGUCUCGUAGACCGU | 1417 | 31703 | HCVa:327U21 sense siNA | B ccGGGAGGucucGuAGAccTT B | 1677 |
| | | | | stab07 | | |
| 328 | CCCGGGAGGUCUCGUAGACCGUG | 1418 | 31704 | HCVa:328U21 sense siNA | B cGGGAGGucucGuAGAccGTT B | 1678 |
| | | | | stab07 | | |
| 329 | CCGGGAGGUCUCGUAGACCGUGC | 1419 | 31705 | HCVa:329U21 sense siNA | B GGGAGGucucGuAGAccGuTT B | 1679 |
| | | | | stab07 | | |
| 326 | GCCCCGGGAGGUCUCGUAGACCG | 1416 | 31706 | HCVa:344L21 antisense | GucuAcGAGAccucccGGGTsT | 1680 |
| | | | | siNA (326C) stab08 | | |
| 327 | CCCCGGGAGGUCUCGUAGACCGU | 1417 | 31707 | HCVa:345L21 antisense | GGucuAcGAGAccucccGGTsT | 1681 |
| | | | | siNA (327C) stab08 | | |
| 328 | CCCGGGAGGUCUCGUAGACCGUG | 1418 | 31708 | HCVa:346L21 antisense | cGGucuAcGAGAccucccGTsT | 1682 |
| | | | | siNA (328C) stab08 | | |
| 329 | CCGGGAGGUCUCGUAGACCGUGC | 1419 | 31709 | HCVa:347L21 antisense | AcGGucuAcGAGAccucccTsT | 1683 |
| | | | | siNA (329C) stab08 | | |
| 326 | GCCCCGGGAGGUCUCGUAGACCG | 1416 | 31710 | HCVa:326U21 sense siNA | B cAGAuGcucuGGAGGGcccTT B | 1684 |
| | | | | inv stab07 | | |
| 327 | CCCCGGGAGGUCUCGUAGACCGU | 1417 | 31711 | HCVa:327U21 sense siNA | B ccAGAuGcucuGGAGGGccTT B | 1685 |
| | | | | inv stab07 | | |
| 328 | CCCGGGAGGUCUCGUAGACCGUG | 1418 | 31712 | HCVa:328U21 sense siNA | B GccAGAuGcucuGGAGGGcTT B | 1686 |
| | | | | inv stab07 | | |
| 329 | CCGGGAGGUCUCGUAGACCGUGC | 1419 | 31713 | HCVa:329U21 sense siNA | B uGccAGAuGcucuGGAGGGTT B | 1687 |
| | | | | inv stab07 | | |
| 326 | GCCCCGGGAGGUCUCGUAGACCG | 1416 | 31714 | HCVa:344L21 antisense | GGGcccuccAGAGcAucuGTsT | 1688 |
| | | | | siNA (326C) inv stab08 | | |
| 327 | CCCCGGGAGGUCUCGUAGACCGU | 1417 | 31715 | HCVa:345L21 antisense | GGcccuccAGAGcAucuGGTsT | 1689 |
| | | | | siNA (327C) inv stab08 | | |
| 328 | CCCGGGAGGUCUCGUAGACCGUG | 1418 | 31716 | HCVa:346L21 antisense | GcccuccAGAGcAucuGGcTsT | 1690 |
| | | | | siNA (328C) inv stab08 | | |
| 329 | CCGGGAGGUCUCGUAGACCGUGC | 1419 | 31717 | HCVa:347L21 antisense | cccuccAGAGcAucuGGcATsT | 1691 |
| | | | | siNA (329C) inv stab08 | | |
| 291 | GCCUUGUGGUACUGCCUGAUAGG | 1403 | 31762 | HCVa:291U21 sense | cuuGuGGuAcuGccuGAuATsT | 1692 |
| | | | | siNA stab08 | | |
| 295 | UGUGGUACUGCCUGAUAGGGUGC | 1404 | 31763 | HCVa:295U21 sense | uGGuAcuGccuGAuAGGGuTsT | 1693 |
| | | | | siNA stab08 | | |
| 325 | UGCCCCGGGAGGUCUCGUAGACC | 1394 | 31764 | HCVa:325U21 sense | ccccGGGAGGucucGuAGATsT | 1694 |
| | | | | siNA stab08 | | |
| 291 | GCCUUGUGGUACUGCCUGAUAGG | 1403 | 31765 | HCVa:291U21 sense | AuAGuccGucAuGGuGuucTsT | 1695 |
| | | | | siNA inv stab08 | | |
| 295 | UGUGGUACUGCCUGAUAGGGUGC | 1404 | 31766 | HCVa:295U21 sense | uGGGAuAGuccGucAuGGuTsT | 1696 |
| | | | | siNA inv stab08 | | |
| 325 | UGCCCCGGGAGGUCUCGUAGACC | 1394 | 31767 | HCVa:325U21 sense | AGAuGcucuGGAGGGccccTsT | 1697 |
| | | | | siNA inv stab08 | | |
| 327 | CCCCGGGAGGUCUCGUAGACCGU | 1417 | 31928 | HCVa:327U21 sense | ccGGGAGGucucGuAGAccTsT | 1698 |
| | | | | siNA stab08 | | |
| 327 | CCCCGGGAGGUCUCGUAGACCGU | 1417 | 31929 | HCVa:327U21 sense | ccAGAuGcucuGGAGGGccTsT | 1699 |
| | | | | siNA inv stab08 | | |
| 328 | CCCGGGAGGUCUCGUAGACCGUG | 1418 | 31930 | HCVa:328U21 sense | cGGGAGGucucGuAGAccGTsT | 1700 |
| | | | | siNA stab08 | | |
| 328 | CCCGGGAGGUCUCGUAGACCGUG | 1418 | 31931 | HCVa:328U21 sense | GccAGAuGcucuGGAGGGcTsT | 1701 |
| | | | | siNA inv stab08 | | |
| 327 | CCCCGGGAGGUCUCGUAGACCGU | 1417 | 32007 | HCVa:327U21 sense | B ccGGGAGGucucGuAGAccTsT | 1702 |
| | | | | siNA stab08 + 5′ | | |
| | | | | abasic | | |
| 327 | CCCCGGGAGGUCUCGUAGACCGU | 1417 | 32008 | HCVa:327U21 sense | ccGGGAGGucucGuAGAccTsT B | 1703 |
| | | | | siNA stab08 + 3′ | | |
| | | | | abasic | | |
| 327 | CCCCGGGAGGUCUCGUAGACCGU | 1417 | 32009 | HCVa:327U21 sense | B ccGGGAGGucucGuAGAccTsT B | 1704 |
| | | | | siNA stab08 + 5′ & 3′ | | |
| | | | | abasic | | |
| 327 | CCCCGGGAGGUCUCGUAGACCGU | 1417 | 32174 | HCVa:327 siNA 3′- | UCUCGUAGACCUU | 1705 |
| | | | | classl 10 bp | GGUCUACGAGACCUCCCGGTT | |
| 327 | CCCCGGGAGGUCUCGUAGACCGU | 1417 | 32175 | HCVa:327 siNA 3′- | UCGUAGACCUU | 1706 |
| | | | | classl 8 bp | GGUCUACGAGACCUCCCGGTT | |
| 327 | CCCCGGGAGGUCUCGUAGACCGU | 1417 | 32176 | HCVa:327 siNA 3′- | GUAGACCUU | 1707 |
| | | | | classl 6 bp | GGUCUACGAGACCUCCCGGTT | |
| 327 | CCCCGGGAGGUCUCGUAGACCGU | 1417 | 32177 | HCVa:327 siNA 3′- | AGACCUU | 1708 |
| | | | | classl 4 bp | GGUCUACGAGACCUCCCGGTT | |
| 327 | CCCCGGGAGGUCUCGUAGACCGU | 1417 | 32178 | HCVa:327 siNA 5′- | GGUCUACGAGACCUCCCGGUU | 1709 |
| | | | | classl 10 bp | CCGGGAGGUCU | |
| 327 | CCCCGGGAGGUCUCGUAGACCGU | 1417 | 32179 | HCVa:327 siNA 5′- | GGUCUACGAGACCUCCCGGUU | 1710 |
| | | | | classl 8 bp | CCGGGAGGU | |
| 327 | CCCCGGGAGGUCUCGUAGACCGU | 1417 | 32180 | HCVa:327 siNA 5′- | GGUCUACGAGACCUCCCGGUU | 1711 |
| | | | | classl 6 bp | CCGGGAG | |
| 327 | CCCCGGGAGGUCUCGUAGACCGU | 1417 | 32181 | HCVa:327 siNA 5′- | GGUCUACGAGACCUCCCGGUU | 1712 |
| | | | | classl 4 bp | CCGGG | |
| 327 | CCCCGGGAGGUCUCGUAGACCGU | 1417 | 32182 | HCVa:327 siNA 3′- | CUCGUAGACC GAAA | 1713 |
| | | | | gaaa 10 bp | GGUCUACGAGACCUCCCGGTT | |
| 327 | CCCCGGGAGGUCUCGUAGACCGU | 1417 | 32183 | HCVa:327 siNA 3′- | CGUAGACC GAAA | 1714 |
| | | | | gaaa 8 bp | GGUCUACGAGACCUCCCGGTT | |
| 327 | CCCCGGGAGGUCUCGUAGACCGU | 1417 | 32184 | HCVa:327 siNA 3′- | UAGACC GAAA | 1715 |
| | | | | gaaa 6 bp | GGUCUACGAGACCUCCCGGTT | |
| 327 | CCCCGGGAGGUCUCGUAGACCGU | 1417 | 32185 | HCVa:327 siNA 3′- | GACC GAAA | 1716 |
| | | | | gaaa 4 bp | GGUCUACGAGACCUCCCGGTT | |
| 327 | CCCCGGGAGGUCUCGUAGACCGU | 1417 | 32186 | HCVa:327 siNA 5′- | GGUCUACGAGACCUCCCGGUU | 1717 |
| | | | | gaaa 10 bp | GAAA CCGGGAGGUC | |
| 327 | CCCCGGGAGGUCUCGUAGACCGU | 1417 | 32187 | HCVa:327 siNA 5′- | GGUCUACGAGACCUCCCGGUU | 1718 |
| | | | | gaaa 8 bp | GAAA CCGGGAGG | |
| 327 | CCCCGGGAGGUCUCGUAGACCGU | 1417 | 32188 | HCVa:327 siNA 5′- | GGUCUACGAGACCUCCCGGUU | 1719 |
| | | | | gaaa 6 bp | GAAA CCGGGA | |
| 327 | CCCCGGGAGGUCUCGUAGACCGU | 1417 | 32189 | HCVa:327 siNA 5′- | GGUCUACGAGACCUCCCGGUU GAAA | 1720 |
| | | | | gaaa 4 bp | CCGG CGUAGACCUU UUUGUGUAG | |
| 327 | CCCCGGGAGGUCUCGUAGACCGU | 1417 | 32190 | HCVa:327 siNA 3′- | GGUCUACGAGACCUCCCGGTT | 1721 |
| | | | | uuuguguag 10 bp | UAGACCUU UUUGUGUAG | |
| 327 | CCCCGGGAGGUCUCGUAGACCGU | 1417 | 32191 | HCVa:327 siNA 3′- | GGUCUACGAGACCUCCCGGTT | 1722 |
| | | | | uuuguguag 8 bp | GACCUU UUUGUGUAG | |
| 327 | CCCCGGGAGGUCUCGUAGACCGU | 1417 | 32192 | HCVa:327 siNA 3′- | GGUCUACGAGACCUCCCGGTT | 1723 |
| | | | | uuuguguag 6 bp | CCUU UUUGUGUAG | |
| 327 | CCCCGGGAGGUCUCGUAGACCGU | 1417 | 32193 | HCVa:327 siNA 3′- | GGUCUACGAGACCUCCCGGTT | 1724 |
| | | | | uuuguguag 4 bp | GGUCUACGAGACCUCCCGGUU | |
| | | | | | UUUGUGUAG | |
| 327 | CCCCGGGAGGUCUCGUAGACCGU | 1417 | 32194 | HCVa:327 siNA 5′- | CCGGGAGGUC | 1725 |
| | | | | uuuguguag 10 bp | GGUCUACGAGACCUCCCGGUU | |
| | | | | | UUUGUGUAG | |
| 327 | CCCCGGGAGGUCUCGUAGACCGU | 1417 | 32195 | HCVa:327 siNA 5′- | CCGGGAGG | 1726 |
| | | | | uuuguguag 8 bp | GGUCUACGAGACCUCCCGGUU | |
| | | | | | UUUGUGUAG | |
| 327 | CCCCGGGAGGUCUCGUAGACCGU | 1417 | 32196 | HCVa:327 siNA 5′- | CCGGGA | 1727 |
| | | | | uuuguguag 6 bp | GGUCUACGAGACCUCCCGGUU | |
| | | | | | UUUGUGUAG | |
| 327 | CCCCGGGAGGUCUCGUAGACCGU | 1417 | 32197 | HCVa:327 siNA 5′- | GGUCUACGAGACCUCCCGGUU | 1728 |
| | | | | uuuguguag 4 bp | UUUGUGUAG CCGG | |
| 327 | CCCCGGGAGGUCUCGUAGACCGU | 1417 | 32198 | HCVa:345L21 antisense | GGucuAcGAGAccucccGGTsT | 1729 |
| | | | | (327C) stab05 siNA | | |
| 327 | CCCCGGGAGGUCUCGUAGACCGU | 1417 | 32199 | HCVa:345L21 antisense | pGGucuAcGAGAccucccGGTsT | 1730 |
| | | | | (327C) stab05 5′p | | |
| | | | | siNA | | |
| 327 | CCCCGGGAGGUCUCGUAGACCGU | 1417 | 32200 | HCVa:345L21 antisense | sGGucuAcGAGAccucccGGTsT | 1731 |
| | | | | (327C) stab05 5′ps | | |
| | | | | siNA | | |
| 327 | CCCCGGGAGGUCUCGUAGACCGU | 1417 | 32201 | HCVa:345L21 antisense | GGUCUACGAGACCUCCCGGTT | 1732 |
| | | | | (327C) stab00 siNA | | |
| 327 | CCCCGGGAGGUCUCGUAGACCGU | 1417 | 32202 | HCVa:345L21 antisense | pGGUCUACGAGACCUCCCGGTT | 1733 |
| | | | | (327C) v1 5′p siNA | | |
| 327 | CCCCGGGAGGUCUCGUAGACCGU | 1417 | 32203 | HCVa:345L21 antisense | sGGUCUACGAGACCUCCCGGTT | 1734 |
| | | | | (327C) v1 5′ps siNA | | |
| 327 | CCCCGGGAGGUCUCGUAGACCGU | 1417 | 32204 | HCVa:345121 antisense | pGGUCUACGAGACCUCCCGGGGTT | 1735 |
| | | | | (327C) v2 5′p siNA | | |
| 327 | CCCCGGGAGGUCUCGUAGACCGU | 1417 | 32205 | HCVa:345121 antisense | pGGUCUACGAGACCUCCCGG | 1736 |
| | | | | (327C) v3 5′p siNA | UCUCGUA U B | |
| 327 | CCCCGGGAGGUCUCGUAGACCGU | 1417 | 32206 | HCVa:345121 antisense | pGGUCUACGAGACCUCCCGG | 1737 |
| | | | | (327C) v4 5′p siNA | AGGUCUCGUA uu B | |
| 327 | CCCCGGGAGGUCUCGUAGACCGU | 1417 | 32207 | HCVa:345121 antisense | pGGUCUACGAGACCUCCCGGTT | 1738 |
| | | | | (327C) v5 5′p siNA | UCUCGUA u B | |
| 327 | CCCCGGGAGGUCUCGUAGACCGU | 1417 | 32208 | HCVa:345L21 antisense | pGGUCUACGAGACCUCCCGGTT | 1739 |
| | | | | (327C) v6 5′p siNA | AGGUCUCGUA U B | |
| 327 | CCCCGGGAGGUCUCGUAGACCGU | 1417 | 32501 | HCVa:327U21 sense | B ccGGGAGGucucGuAGAccTT B | 1740 |
| | | | | siNA stab04 | | |
| 325 | UGCCCCGGGAGGUCUCGUAGACC | 1394 | 32502 | HCVa:325U21 sense | B CCCCGGGAGGUCUCGUAGATT B | 1741 |
| | | | | siNA stab09 | | |
| 326 | GCCCCGGGAGGUCUCGUAGACCG | 1416 | 32503 | HCVa:326U21 sense | B CCCGGGAGGUCUCGUAGACTT B | 1742 |
| | | | | siNA stab09 | | |
| 327 | CCCCGGGAGGUCUCGUAGACCGU | 1417 | 32504 | HCVa:327U21 sense | B CCGGGAGGUCUCGUAGACCTT B | 1743 |
| | | | | siNA stab09 | | |
| 328 | CCCGGGAGGUCUCGUAGACCGUG | 1418 | 32505 | HCVa:328U21 sense | B CGGGAGGUCUCGUAGACCGTT B | 1744 |
| | | | | siNA stab09 | | |
| 329 | CCGGGAGGUCUCGUAGACCGUGC | 1419 | 32506 | HCVa:329U21 sense | B GGGAGGUCUCGUAGACCGUTT B | 1745 |
| | | | | siNA stab09 | | |
| 325 | UGCCCCGGGAGGUCUCGUAGACC | 1394 | 32507 | HCVa:343L21 antisense | UCUACGAGACCUCCCGGGGTsT | 1746 |
| | | | | siNA (325C) stab10 | | |
| 326 | GCCCCGGGAGGUCUCGUAGACCG | 1416 | 32508 | HCVa:344L21 antisense | GUCUACGAGACCUCCCGGGTsT | 1747 |
| | | | | siNA (326C) stab10 | | |
| 327 | CCCCGGGAGGUCUCGUAGACCGU | 1417 | 32509 | HCVa:345L21 antisense | GGUCUACGAGACCUCCCGGTsT | 1748 |
| | | | | siNA (327C) stab10 | | |
| 328 | CCCGGGAGGUCUCGUAGACCGUG | 1418 | 32510 | HCVa:346L21 antisense | CGGUCUACGAGACCUCCCGTsT | 1749 |
| | | | | siNA (328C) stab10 | | |
| 329 | CCGGGAGGUCUCGUAGACCGUGC | 1419 | 32511 | HCVa:347L21 antisense | ACGGUCUACGAGACCUCCCTsT | 1750 |
| | | | | siNA (329C) stab10 | | |
| 327 | CCCCGGGAGGUCUCGUAGACCGU | 1417 | 32512 | HCVa:327U21 sense | B ccAGAuGcucuGGAGGGccTT B | 1751 |
| | | | | siNA inv stab04 | | |
| 327 | CCCCGGGAGGUCUCGUAGACCGU | 1417 | 32513 | HCVa:345L21 antisense | GGcccuccAGAGcAucuGGTsT | 1752 |
| | | | | siNA (327C) inv stab05 | | |
| 325 | UGCCCCGGGAGGUCUCGUAGACC | 1394 | 32514 | HCVa:325U21 sense | B AGAUGCUCUGGAGGGCCCCTT B | 1753 |
| | | | | siNA inv stab09 | | |
| 326 | GCCCCGGGAGGUCUCGUAGACCG | 1416 | 32515 | HCVa:326U21 sense | B CAGAUGCUCUGGAGGGCCCTT B | 1754 |
| | | | | siNA inv stab09 | | |
| 327 | CCCCGGGAGGUCUCGUAGACCGU | 1417 | 32516 | HCVa:327U21 sense | B CCAGAUGCUCUGGAGGGCCTT B | 1755 |
| | | | | siNA inv stab09 | | |
| 328 | CCCGGGAGGUCUCGUAGACCGUG | 1418 | 32517 | HCVa:328U21 sense | B GCCAGAUGCUCUGGAGGGCTT B | 1756 |
| | | | | siNA inv stab09 | | |
| 329 | CCGGGAGGUCUCGUAGACCGUGC | 1419 | 32518 | HCVa:329U21 sense | B UGCCAGAUGCUCUGGAGGGTT B | 1757 |
| | | | | siNA inv stab09 | | |
| 325 | UGCCCCGGGAGGUCUCGUAGACC | 1394 | 32519 | HCVa:343L21 antisense | GGGGCCCUCCAGAGCAUCUTsT | 1758 |
| | | | | siNA (325C) inv stab10 | | |
| 326 | GCCCCGGGAGGUCUCGUAGACCG | 1416 | 32520 | HCVa:344L21 antisense | GGGCCCUCCAGAGCAUCUGTsT | 1759 |
| | | | | siNA (326C) inv stab10 | | |
| 327 | CCCCGGGAGGUCUCGUAGACCGU | 1417 | 32521 | HCVa:345L21 antisense | GGCCCUCCAGAGCAUCUGGTsT | 1760 |
| | | | | siNA (327C) inv stab10 | | |
| 328 | CCCGGGAGGUCUCGUAGACCGUG | 1418 | 32522 | HCVa:346L21 antisense | GCCCUCCAGAGCAUCUGGCTsT | 1761 |
| | | | | siNA (328C) inv stab10 | | |
| 329 | CCGGGAGGUCUCGUAGACCGUGC | 1419 | 32523 | HCVa:347L21 antisense | CCCUCCAGAGCAUCUGGCATsT | 1762 |
| | | | | siNA (329C) inv stab10 | | |
| 295 | UGUGGUACUGCCUGAUAGGGUGC | 1404 | 32714 | HCVa:313L21 antisense | pACCCUAUCAGGCAGUACCA | 1763 |
| | | | | siNA (295C) v1 5′p | GUACUGCCUGAU B | |
| | | | | palindrome | | |
| 295 | UGUGGUACUGCCUGAUAGGGUGC | 1404 | 32715 | HCVa:313L21 antisense | pACCCUAUCAGGCAGUACC | 1764 |
| | | | | siNA (295C) v2 5′p | GGUACUGCCUGAU B | |
| | | | | palindrome | | |
| 327 | CCCCGGGAGGUCUCGUAGACCGU | 1417 | 32716 | HCVa 5′p-345L21 | pGGUCUACGAGACCUCCCGG | 1765 |
| | | | | antisense (327C) v5 | AGGUCUCGUAGA B | |
| | | | | 5′p palindrome siNA | | |
| 327 | CCCCGGGAGGUCUCGUAGACCGU | 1417 | 32717 | HCVa 5′p-345L21 | pGGUCUACGAGACCUCC | 1766 |
| | | | | antisense (327C) | GGAGGUCUCGUA B | |
| | | | | v6 5′p palindrome | | |
| | | | | siNA | | |
| 291 | GCCUUGUGGUACUGCCUGAUAGG | 1403 | 32796 | HCVa:309L21 antisense | uAucAgGcaguaccAcaAgTsT | 1767 |
| | | | | siNA (291C) stab08 | | |
| | | | | mod pair to #30651 | | |
| 295 | UGUGGUACUGCCUGAUAGGGUGC | 1404 | 32797 | HCVa:313L21 antisense | acccuaucaggcaguAccaTsT | 1768 |
| | | | | siNA (295C) stab08 | | |
| | | | | mod pair to #30652 | | |
| 303 | UGCCUGAUAGGGUGCUUGCGAGU | 1410 | 32798 | HCVa:321L21 antisense | ucgcaaGcacccuAucaggTsT | 1769 |
| | | | | siNA (303C) stab08 | | |
| | | | | mod pair to #30658 | | |
| 306 | CUGAUAGGGUGCUUGCGAGUGCC | 1411 | 32799 | HCVa:324L21 antisense | cacucgcAagcacccuaucTsT | 1770 |
| | | | | siNA (306C) stab08 | | |
| | | | | mod A pair to #30659 | | |
| 306 | CUGAUAGGGUGCUUGCGAGUGCC | 1411 | 32800 | HCVa:324L21 antisense | cAcucgcAagcacccuaucTsT | 1771 |
| | | | | siNA (306C) stab08 | | |
| | | | | mod B pair to #30659 | | |
| 140 | UCCCGGGAGAGCCAUAGUGGUCU | 1420 | 33125 | HCVa:140U21 sense | B ccGGGAGAGccAuAGuGGuTT B | 1772 |
| | | | | siNA stab07 | | |
| 141 | CCCGGGAGAGCCAUAGUGGUCUG | 1421 | 33126 | HCVa:141U21 sense | B cGGGAGAGCCAuAGuGGucTT B | 1773 |
| | | | | siNA stab07 | | |
| 142 | CCGGGAGAGCCAUAGUGGUCUGC | 1422 | 33127 | HCVa:142U21 sense | B GGGAGAGccAuAGuGGucuTT B | 1774 |
| | | | | siNA stab07 | | |
| 154 | UAGUGGUCUGCGGAACCGGUGAG | 1423 | 33128 | HCVa:154U21 sense | B GuGGucuGcGGAAccGGuGTT B | 1775 |
| | | | | siNA stab07 | | |
| 155 | AGUGGUCUGCGGAACCGGUGAGU | 1424 | 33129 | HCVa:155U21 sense | B uGGucuGcGGAAccGGuGATT B | 1776 |
| | | | | siNA stab07 | | |
| 156 | GUGGUCUGCGGAACCGGUGAGUA | 1425 | 33130 | HCVa:156U21 sense | B GGucuGcGGAAccGGuGAGTT B | 1777 |
| | | | | siNA stab07 | | |
| 157 | UGGUCUGCGGAACCGGUGAGUAC | 1426 | 33131 | HCVa:157U21 sense | B GucuGcGGAACcGGuGAGuTT B | 1778 |
| | | | | siNA stab07 | | |
| 158 | GGUCUGCGGAACCGGUGAGUACA | 1427 | 33132 | HCVa:158U21 sense | B ucuGcGGAAccGGuGAGuATT B | 1779 |
| | | | | siNA stab07 | | |
| 160 | UCUGCGGAACCGGUGAGUACACC | 1428 | 33133 | HCVa:160U21 sense | B uGcGGAAccGGuGAGuAcATT B | 1780 |
| | | | | siNA stab07 | | |
| 161 | CUGCGGAACCGGUGAGUACACCG | 1429 | 33134 | HCVa:161U21 sense | B GcGGAAccGGuGAGuAcAcTT B | 1781 |
| | | | | siNA stab07 | | |
| 164 | CGGAACCGGUGAGUACACCGGAA | 1430 | 33135 | HCVa:164U21 sense | B GAAccGGuGAGuAcAccGGTT B | 1782 |
| | | | | siNA stab07 | | |
| 165 | GGAACCGGUGAGUACACCGGAAU | 1431 | 33136 | HCVa:165U21 sense | B AAccGGuGAGuAcAccGGATT B | 1783 |
| | | | | siNA stab07 | | |
| 166 | GAACCGGUGAGUACACCGGAAUU | 1432 | 33137 | HCVa:166U21 sense | B AccGGuGAGuAcAccGGAATT B | 1784 |
| | | | | siNA stab07 | | |
| 167 | AACCGGUGAGUACACCGGAAUUG | 1433 | 33138 | HCVa:167U21 sense | B ccGGuGAGuAcAccGGAAuTT B | 1785 |
| | | | | siNA stab07 | | |
| 282 | UCGCGAAAGGCCUUGUGGUACUG | 1434 | 33139 | HCVa:282U21 sense | B GcGAAAGGccuuGuGGuAcTT B | 1786 |
| | | | | siNA stab07 | | |
| 283 | CGCGAAAGGCCUUGUGGUACUGC | 1435 | 33140 | HCVa:283U21 sense | B cGAAAGGccuuGuGGuAcuTT B | 1787 |
| | | | | siNA stab07 | | |
| 284 | GCGAAAGGCCUUGUGGUACUGCC | 1436 | 33141 | HCVa:284U21 sense | B GAAAGGccuuGuGGuAcuGTT B | 1788 |
| | | | | siNA stab07 | | |
| 285 | CGAAAGGCCUUGUGGUACUGCCU | 1437 | 33142 | HCVa:285U21 sense | B AAAGGccuuGuGGuAcuGcTT B | 1789 |
| | | | | siNA stab07 | | |
| 286 | GAAAGGCCUUGUGGUACUGCCUG | 1438 | 33143 | HCVa:286U21 sense | B AAGGccuuGuGGuAcuGccTT B | 1790 |
| | | | | siNA stab07 | | |
| 288 | AAGGCCUUGUGGUACUGCCUGAU | 1439 | 33144 | HCVa:288U21 sense | B GGccuuGuGGuAcuGccuGTT B | 1791 |
| | | | | siNA stab07 | | |
| 289 | AGGCCUUGUGGUACUGCCUGAUA | 1440 | 33145 | HCVa:289U21 sense | B GccuuGuGGuAcuGccuGATT B | 1792 |
| | | | | siNA stab07 | | |
| 290 | GGCCUUGUGGUACUGCCUGAUAG | 1441 | 33146 | HCVa:290U21 sense | B ccuuGuGGuAcuGccuGAuTT B | 1793 |
| | | | | siNA stab07 | | |
| 299 | GUACUGCCUGAUAGGGUGCUUGC | 1442 | 33147 | HCVa:299U21 sense | B AcuGccuGAuAGGGuGcuuTT B | 1794 |
| | | | | siNA stab07 | | |
| 302 | CUGCCUGAUAGGGUGCUUGCGAG | 1443 | 33148 | HCVa:302U21 sense | B GccuGAuAGGGuGcuuGcGTT B | 1795 |
| | | | | siNA stab07 | | |
| 304 | GCCUGAUAGGGUGCUUGCGAGUG | 1444 | 33149 | HCVa:304U21 sense | B cuGAuAGGGuGcuuGcGAGTT B | 1796 |
| | | | | siNA stab07 | | |
| 305 | CCUGAUAGGGUGCUUGCGAGUGC | 1445 | 33150 | HCVa:305U21 sense | B uGAuAGGGuGcuuGcGAGuTT B | 1797 |
| | | | | siNA stab07 | | |
| 307 | UGAUAGGGUGCUUGCGAGUGCCC | 1446 | 33151 | HCVa:307U21 sense | B AuAGGGuGcuuGcGAGuGcTT B | 1798 |
| | | | | siNA stab07 | | |
| 308 | GAUAGGGUGCUUGCGAGUGCCCC | 1447 | 33152 | HCVa:308U21 sense | B uAGGGuGcuuGcGAGuGccTT B | 1799 |
| | | | | siNA stab07 | | |
| 310 | UAGGGUGCUUGCGAGUGCCCCGG | 1448 | 33153 | HCVa:310U21 sense | B GGGuGcuuGcGAGuGccccTT B | 1800 |
| | | | | siNA stab07 | | |
| 311 | AGGGUGCUUGCGAGUGCCCCGGG | 1449 | 33154 | HCVa:311U21 sense | B GGuGCuuGcGAGuGccccGTT B | 1801 |
| | | | | siNA stab07 | | |
| 314 | GUGCUUGCGAGUGCCCCGGGAGG | 1450 | 33155 | HCVa:314U21 sense | B GcuuGcGAGuGccccGGGATT B | 1802 |
| | | | | siNA stab07 | | |
| 315 | UGCUUGCGAGUGCCCCGGGAGGU | 1451 | 33156 | HCVa:315U21 sense | B cuuGcGAGuGccccGGGAGTT B | 1803 |
| | | | | siNA stab07 | | |
| 316 | GCUUGCGAGUGCCCCGGGAGGUC | 1452 | 33157 | HCVa:316U21 sense | B uuGcGAGuGccccGGGAGGTT B | 1804 |
| | | | | siNA stab07 | | |
| 317 | CUUGCGAGUGCCCCGGGAGGUCU | 1453 | 33158 | HCVa:317U21 sense | B uGcGAGuGccccGGGAGGuTT B | 1805 |
| | | | | siNA stab07 | | |
| 318 | UUGCGAGUGCCCCGGGAGGUCUC | 1454 | 33159 | HCVa:318U21 sense | B GcGAGuGccccGGGAGGucTT B | 1806 |
| | | | | siNA stab07 | | |
| 319 | UGCGAGUGCCCCGGGAGGUCUCG | 1455 | 33160 | HCVa:319U21 sense | B cGAGuGccccGGGAGGucuTT B | 1807 |
| | | | | siNA stab07 | | |
| 320 | GCGAGUGCCCCGGGAGGUCUCGU | 1456 | 33161 | HCVa:320U21 sense | B GAGuGccccGGGAGGucucTT B | 1808 |
| | | | | siNA stab07 | | |
| 322 | GAGUGCCCCGGGAGGUCUCGUAG | 1457 | 33162 | HCVa:322U21 sense | B GuGccccGGGAGGucucGuTT B | 1809 |
| | | | | siNA stab07 | | |
| 323 | AGUGCCCCGGGAGGUCUCGUAGA | 1458 | 33163 | HCVa:323U21 sense | B uGccccGGGAGGucucGuATT B | 1810 |
| | | | | siNA stab07 | | |
| 330 | CGGGAGGUCUCGUAGACCGUGCA | 1459 | 33164 | HCVa:330U21 sense | B GGAGGucucGuAGAccGuGTT B | 1811 |
| | | | | siNA stab07 | | |
| 140 | UCCCGGGAGAGCCAUAGUGGUCU | 1420 | 33165 | HCVa:158L21 antisense | AccAcuAuGGcucucccGGTsT | 1812 |
| | | | | siNA (140C) stab08 | | |
| 141 | CCCGGGAGAGCCAUAGUGGUCUG | 1421 | 33166 | HCVa:159L21 antisense | GaccAcuAuGGcucucccGTsT | 1813 |
| | | | | siNA (141C) stab08 | | |
| 142 | CCGGGAGAGCCAUAGUGGUCUGC | 1422 | 33167 | HCVa:160L21 antisense | AGAccAcuAuGGcucucccTsT | 1814 |
| | | | | siNA (142C) stab08 | | |
| 154 | UAGUGGUCUGCGGAACCGGUGAG | 1423 | 33168 | HCVa:172L21 antisense | cAccGGuuccGcAGAccAcTsT | 1815 |
| | | | | siNA (154C) stab08 | | |
| 155 | AGUGGUCUGCGGAACCGGUGAGU | 1424 | 33169 | HCVa:173L21 antisense | ucAccGGuuccGcAGAccATsT | 1816 |
| | | | | siNA (155C) stab08 | | |
| 156 | GUGGUCUGCGGAACCGGUGAGUA | 1425 | 33170 | HCVa:174L21 antisense | cucAccGGuuccGcAGAccTsT | 1817 |
| | | | | siNA (156C) stab08 | | |
| 157 | UGGUCUGCGGAACCGGUGAGUAC | 1426 | 33171 | HCVa:175L21 antisense | AcucAccGGuuccGcAGAcTsT | 1818 |
| | | | | siNA (157C) stab08 | | |
| 158 | GGUCUGCGGAACCGGUGAGUACA | 1427 | 33172 | HCVa:176L21 antisense | uAcucAccGGuuccGcAGATsT | 1819 |
| | | | | siNA (158C) stab08 | | |
| 160 | UCUGCGGAACCGGUGAGUACACC | 1428 | 33173 | HCVa:178L21 antisense | uGuAcucAccGGuuccGcATsT | 1820 |
| | | | | siNA (160C) stab08 | | |
| 161 | CUGCGGAACCGGUGAGUACACCG | 1429 | 33174 | HCVa:179L21 antisense | GuGuAcucAccGGuuccGcTsT | 1821 |
| | | | | siNA (161C) stab08 | | |
| 164 | CGGAACCGGUGAGUACACCGGAA | 1430 | 33175 | HCVa:182L21 antisense | ccGGuGuAcucAccGGuucTsT | 1822 |
| | | | | siNA (164C) stab08 | | |
| 165 | GGAACCGGUGAGUACACCGGAAU | 1431 | 33176 | HCVa:183L21 antisense | uccGGuGuAcucAccGGuuTsT | 1823 |
| | | | | siNA (165C) stab08 | | |
| 166 | GAACCGGUGAGUACACCGGAAUU | 1432 | 33177 | HCVa:184L21 antisense | uuccGGuGuAcucAccGGuTsT | 1824 |
| | | | | siNA (166C) stab08 | | |
| 167 | AACCGGUGAGUACACCGGAAUUG | 1433 | 33178 | HCVa:185L21 antisense | AuuccGGuGuAcucAccGGTsT | 1825 |
| | | | | siNA (167C) stab08 | | |
| 282 | UCGCGAAAGGCCUUGUGGUACUG | 1434 | 33179 | HCVa:300L21 antisense | GuAccAcAAGGccuuucGcTsT | 1826 |
| | | | | siNA (282C) stab08 | | |
| 283 | CGCGAAAGGCCUUGUGGUACUGC | 1435 | 33180 | HCVa:301L21 antisense | AGuAccAcAAGGccuuucGTsT | 1827 |
| | | | | siNA (283C) stab08 | | |
| 284 | GCGAAAGGCCUUGUGGUACUGCC | 1436 | 33181 | HCVa:302L21 antisense | cAGuAccAcAAGGccuuucTsT | 1828 |
| | | | | siNA (284C) stab08 | | |
| 285 | CGAAAGGCCUUGUGGUACUGCCU | 1437 | 33182 | HCVa:303L21 antisense | GcAGuAccAcAAGGccuuuTsT | 1829 |
| | | | | siNA (285C) stab08 | | |
| 286 | GAAAGGCCUUGUGGUACUGCCUG | 1438 | 33183 | HCVa:304121 antisense | GGcAGuAccAcAAGGccuuTsT | 1830 |
| | | | | siNA (286C) stab08 | | |
| 288 | AAGGCCUUGUGGUACUGCCUGAU | 1439 | 33184 | HCVa:306121 antisense | cAGGcAGuAccAcAAGGccTsT | 1831 |
| | | | | siNA (288C) stab08 | | |
| 289 | AGGCCUUGUGGUACUGCCUGAUA | 1440 | 33185 | HCVa:307121 antisense | ucAGGcAGuAccAcAAGGcTsT | 1832 |
| | | | | siNA (289C) stab08 | | |
| 290 | GGCCUUGUGGUACUGCCUGAUAG | 1441 | 33186 | HCVa:308121 antisense | AucAGGcAGuAccAcAAGGTsT | 1833 |
| | | | | siNA (290C) stab08 | | |
| 299 | GUACUGCCUGAUAGGGUGCUUGC | 1442 | 33187 | HCVa:317121 antisense | AAGcAcccuAucAGGcAGuTsT | 1834 |
| | | | | siNA (299C) stab08 | | |
| 302 | CUGCCUGAUAGGGUGCUUGCGAG | 1443 | 33188 | HCVa:320121 antisense | cGcAAGcAcccuAucAGGcTsT | 1835 |
| | | | | siNA (302C) stab08 | | |
| 304 | GCCUGAUAGGGUGCUUGCGAGUG | 1444 | 33189 | HCVa:322L21 antisense | cucGcAAGcAcccuAucAGTsT | 1836 |
| | | | | siNA (304C) stab08 | | |
| 305 | CCUGAUAGGGUGCUUGCGAGUGC | 1445 | 33190 | HCVa:323L21 antisense | AcucGcAAGcAcccuAucATsT | 1837 |
| | | | | siNA (305C) stab08 | | |
| 307 | UGAUAGGGUGCUUGCGAGUGCCC | 1446 | 33191 | HCVa:325121 antisense | GcAcucGcAAGcAcccuAuTsT | 1838 |
| | | | | siNA (307C) stab08 | | |
| 308 | GAUAGGGUGCUUGCGAGUGCCCC | 1447 | 33192 | HCVa:326121 antisense | GGcAcucGcAAGcAcccuATsT | 1839 |
| | | | | siNA (308C) stab08 | | |
| 310 | UAGGGUGCUUGCGAGUGCCCCGG | 1448 | 33193 | HCVa:328121 antisense | GGGGcAcucGcAAGcAcccTsT | 1840 |
| | | | | siNA (310C) stab08 | | |
| 311 | AGGGUGCUUGCGAGUGCCCCGGG | 1449 | 33194 | HCVa:329L21 antisense | cGGGGcAcucGcAAGcAccTsT | 1841 |
| | | | | siNA (311C) stab08 | | |
| 314 | GUGCUUGCGAGUGCCCCGGGAGG | 1450 | 33195 | HCVa:332121 antisense | ucccGGGGcAcucGcAAGcTsT | 1842 |
| | | | | siNA (314C) stab08 | | |
| 315 | UGCUUGCGAGUGCCCCGGGAGGU | 1451 | 33196 | HCVa:333121 antisense | cucccGGGGcAcucGcAAGTsT | 1843 |
| | | | | siNA (315C) stab08 | | |
| 316 | GCUUGCGAGUGCCCCGGGAGGUC | 1452 | 33197 | HCVa:334L21 antisense | ccucccGGGGcAcucGcAATsT | 1844 |
| | | | | siNA (316C) stab08 | | |
| 317 | CUUGCGAGUGCCCCGGGAGGUCU | 1453 | 33198 | HCVa:335L21 antisense | AccucccGGGGcAcucGcATsT | 1845 |
| | | | | siNA (317C) stab08 | | |
| 318 | UUGCGAGUGCCCCGGGAGGUCUC | 1454 | 33199 | HCVa:336L21 antisense | GAccucccGGGGcAcucGcTsT | 1846 |
| | | | | siNA (318C) stab08 | | |
| 319 | UGCGAGUGCCCCGGGAGGUCUCG | 1455 | 33200 | HCVa:337121 antisense | AGAccucccGGGGcAcucGTsT | 1847 |
| | | | | siNA (319C) stab08 | | |
| 320 | GCGAGUGCCCCGGGAGGUCUCGU | 1456 | 33201 | HCVa:338L21 antisense | GAGAccucccGGGGcAcucTsT | 1848 |
| | | | | siNA (320C) stab08 | | |
| 322 | GAGUGCCCCGGGAGGUCUCGUAG | 1457 | 33202 | HCVa:340L21 antisense | AcGAGAccucccGGGGcAcTsT | 1849 |
| | | | | siNA (322C) stab08 | | |
| 323 | AGUGCCCCGGGAGGUCUCGUAGA | 1458 | 33203 | HCVa:341L21 antisense | uAcGAGAccucccGGGGcATsT | 1850 |
| | | | | siNA (323C) stab08 | | |
| 330 | CGGGAGGUCUCGUAGACCGUGCA | 1459 | 33204 | HCVa:348L21 antisense | cAcGGucuAcGAGAccuccTsT | 1851 |
| | | | | siNA (330C) stab08 | | |
| 303 | UGCCUGAUAGGGUGCUUGCGAGU | 1410 | 33329 | HCVa:321L21 antisense | pucGcAAGcAcccuAucAGGTsT | 1852 |
| | | | | siNA (303C) stab08 + | | |
| | | | | 5′ P | | |
| 303 | UGCCUGAUAGGGUGCUUGCGAGU | 1410 | 33330 | HCVa:321L21 antisense | pucGcAAGcAcccuAucAGGTsT | 1853 |
| | | | | siNA (303C) stab05 + | | |
| | | | | 5′ P | | |
| 295 | UGUGGUACUGCCUGAUAGGGUGC | 1404 | 33331 | HCVa:313L21 antisense | pAcccuAucAGGcAGuAccATsT | 1854 |
| | | | | siNA (295C) stab05 + | | |
| | | | | 5′ P | | |
| 295 | UGUGGUACUGCCUGAUAGGGUGC | 1404 | 33332 | HCVa:313L21 antisense | pAcccuAucAGGcAGuAccATsT | 1855 |
| | | | | siNA (295C) stab08 + | | |
| | | | | 5′ P | | |
| 306 | CUGAUAGGGUGCUUGCGAGUGCC | 1411 | 33333 | HCVa:324L21 antisense | pcAcucGcAAGcAcccuAucTsT | 1856 |
| | | | | siNA (306C) stab08 + | | |
| | | | | 5′ P | | |
| 327 | CCCCGGGAGGUCUCGUAGACCGU | 1417 | 33334 | HCVa:345L21 antisense | pGGucuAcGAGAccucccGGTsT | 1857 |
| | | | | siNA (327C) stab08 + | | |
| | | | | 5′ P | | |
| 303 | UGCCUGAUAGGGUGCUUGCGAGU | 1410 | 33346 | HCVa:321L21 antisense | L ucGcAAGcAcccuAucAGGTsT | 1858 |
| | | | | siNA (303C) stab08 + | | |
| | | | | 5′ aminoL | | |
| 303 | UGCCUGAUAGGGUGCUUGCGAGU | 1410 | 33347 | HCVa:321L21 antisense | L ucGcAAGcAcccuAucAGGTsT | 1859 |
| | | | | siNA (303C) stab05 + | | |
| | | | | 5′ aminoL | | |
| 295 | UGUGGUACUGCCUGAUAGGGUGC | 1404 | 33348 | HCVa:313L21 antisense | L AcccuAucAGGcAGuAccATsT | 1860 |
| | | | | siNA (295C) stab05 + | | |
| | | | | 5′ aminoL | | |
| 295 | UGUGGUACUGCCUGAUAGGGUGC | 1404 | 33349 | HCVa:313L21 antisense | L AcccuAucAGGcAGuAccATsT | 1861 |
| | | | | siNA (295C) stab08 + | | |
| | | | | 5′ aminoL | | |
| 306 | CUGAUAGGGUGCUUGCGAGUGCC | 1411 | 33350 | HCVa:324L21 antisense | L cAcucGcAAGcAcccuAucTsT | 1862 |
| | | | | siNA (306C) stab08 + | | |
| | | | | 5′ aminoL | | |
| 327 | CCCCGGGAGGUCUCGUAGACCGU | 1417 | 33351 | HCVa:345L21 antisense | L GGucuAcGAGAccucccGGTsT | 1863 |
| | | | | siNA (327C) stab08 + | | |
| | | | | 5′ aminoL | | |
| 327 | CCCCGGGAGGUCUCGUAGACCGU | 1417 | 34024 | HCVa:327U21 sense | B ccGAGAGGucGcGuAGuccTT B | 1864 |
| | | | | siNA inact1 stab07 | | |
| 327 | CCCCGGGAGGUCUCGUAGACCGU | 1417 | 34025 | HCVa:327U21 sense | B ccGAGAGGucGcGucGAucTT B | 1865 |
| | | | | siNA inact2 stab07 | | |
| 327 | CCCCGGGAGGUCUCGUAGACCGU | 1417 | 34026 | HCVa:327U21 sense | B ccGGuAGGucccGuGGAcATT B | 1866 |
| | | | | siNA inact3 stab07 | | |
| 327 | CCCCGGGAGGUCUCGUAGACCGU | 1417 | 34027 | HCVa:345L21 antisense | GGAcuAcGcGAccucucGGTsT | 1867 |
| | | | | siNA (327C) inact1 | | |
| | | | | stab08 | | |
| 327 | CCCCGGGAGGUCUCGUAGACCGU | 1417 | 34028 | HCVa:345L21 antisense | GAucGAcGcGAccucucGGTsT | 1868 |
| | | | | siNA (327C) inact2 | | |
| | | | | stab08 | | |
| 327 | CCCCGGGAGGUCUCGUAGACCGU | 1417 | 34029 | HCVa:345L21 antisense | uGuccAcGGGAccuAccGGTsT | 1869 |
| | | | | siNA (327C) inact3 | | |
| | | | | stab08 | | |
| 282 | UCGCGAAAGGCCUUGUGGUACUG | 1434 | 34030 | HCVa:282U21 sense | B GcuAAAGGcGuuGuGGcAcTT B | 1870 |
| | | | | siNA inact1 stab07 | | |
| 282 | UCGCGAAAGGCCUUGUGGUACUG | 1434 | 34031 | HCVa:282U21 sense | B GcGuAAGGcccuGuGGuAATT B | 1871 |
| | | | | siNA inact2 stab07 | | |
| 282 | UCGCGAAAGGCCUUGUGGUACUG | 1434 | 34032 | HCVa:282U21 sense | B GAGAAAcGccuGGuGGuucTT B | 1872 |
| | | | | siNA inact3 stab07 | | |
| 283 | CGCGAAAGGCCUUGUGGUACUGC | 1435 | 34033 | HCVa:283U21 sense | B cGuAAGGcAuuGuGGcAcuTT B | 1873 |
| | | | | siNA inact1 stab07 | | |
| 283 | CGCGAAAGGCCUUGUGGUACUGC | 1435 | 34034 | HCVa:283U21 sense | B cGAGAGGcAuuGuGcuAcuTT B | 1874 |
| | | | | siNA inact2 stab07 | | |
| 283 | CGCGAAAGGCCUUGUGGUACUGC | 1435 | 34035 | HCVa:283U21 sense | B ccAAAGGucuuGAGGuGcuTT B | 1875 |
| | | | | siNA inact3 stab07 | | |
| 304 | GCCUGAUAGGGUGCUUGCGAGUG | 1444 | 34036 | HCVa:304U21 sense | B cGGAuAGGcuGcuuGuGAGTT B | 1876 |
| | | | | siNA inact1 stab07 | | |
| 304 | GCCUGAUAGGGUGCUUGCGAGUG | 1444 | 34037 | HCVa:304U21 sense | B cuGcuAGGGuAcuuGGGAGTT B | 1877 |
| | | | | siNA inact2 stab07 | | |
| 304 | GCCUGAUAGGGUGCUUGCGAGUG | 1444 | 34038 | HCVa:304U21 sense | B ccGAuAuGGuGAuuGcGGGTT B | 1878 |
| | | | | siNA inact3 stab07 | | |
| 307 | UGAUAGGGUGCUUGCGAGUGCCC | 1446 | 34039 | HCVa:307U21 sense | B AuuGGGuGcuGGcGAGuAcTT B | 1879 |
| | | | | siNA inact1 stab07 | | |
| 307 | UGAUAGGGUGCUUGCGAGUGCCC | 1446 | 34040 | HCVa:307U21 sense | B AuAuGGuGccuGcGAGuGGTT B | 1880 |
| | | | | siNA inact2 stab07 | | |
| 307 | UGAUAGGGUGCUUGCGAGUGCCC | 1446 | 34041 | HCVa:307U21 sense | B AGAGGGuAcuuGcGcGuGuTT B | 1881 |
| | | | | siNA inact3 stab07 | | |
| 282 | UCGCGAAAGGCCUUGUGGUACUG | 1434 | 34042 | HCVa:300L21 antisense | GuGccAcAAcGccuuuAGcTsT | 1882 |
| | | | | siNA (282C) inact1 | | |
| | | | | stab08 | | |
| 282 | UCGCGAAAGGCCUUGUGGUACUG | 1434 | 34043 | HCVa:300L21 antisense | uuAccAcAGGGccuuAcGcTsT | 1883 |
| | | | | siNA (282C) inact2 | | |
| | | | | stab08 | | |
| 282 | UCGCGAAAGGCCUUGUGGUACUG | 1434 | 34044 | HCVa:300L21 antisense | GAAccAccAGGcGuuucucTsT | 1884 |
| | | | | siNA (282C) inact3 | | |
| | | | | stab08 | | |
| 283 | CGCGAAAGGCCUUGUGGUACUGC | 1435 | 34045 | HCVa:301L21 antisense | AguGccAcAAuGccuuAcGTsT | 1885 |
| | | | | siNA (283C) inact1 | | |
| | | | | stab08 | | |
| 283 | CGCGAAAGGCCUUGUGGUACUGC | 1435 | 34046 | HCVa:301L21 antisense | AguAGcAcAAuGccucucGTsT | 1886 |
| | | | | siNA (283C) inact2 | | |
| | | | | stab08 | | |
| 283 | CGCGAAAGGCCUUGUGGUACUGC | 1435 | 34047 | HCVa:301L21 antisense | AGcAccucAAGAccuuuGGTsT | 1887 |
| | | | | siNA (283C) inact3 | | |
| | | | | stab08 | | |
| 304 | GCCUGAUAGGGUGCUUGCGAGUG | 1444 | 34048 | HCVa:322L21 antisense | cucAcAAGcAGccuAuccGTsT | 1888 |
| | | | | siNA (304C) inact1 | | |
| | | | | stab08 | | |
| 304 | GCCUGAUAGGGUGCUUGCGAGUG | 1444 | 34049 | HCVa:322L21 antisense | cucccAAGuAcccuAGcAGTsT | 1889 |
| | | | | siNA (304C) inact2 | | |
| | | | | stab08 | | |
| 304 | GCCUGAUAGGGUGCUUGCGAGUG | 1444 | 34050 | HCVa:322L21 antisense | cccGcAAucAccAuAucGGTsT | 1890 |
| | | | | siNA (304C) inact3 | | |
| | | | | stab08 | | |
| 307 | UGAUAGGGUGCUUGCGAGUGCCC | 1446 | 34051 | HCVa:325L21 antisense | GuAcucGccAGcAcccAAuTsT | 1891 |
| | | | | siNA (307C) inact1 | | |
| | | | | stab08 | | |
| 307 | UGAUAGGGUGCUUGCGAGUGCCC | 1446 | 34052 | HCVa:325L21 antisense | ccAcucGcAGGcAccAuAuTsT | 1892 |
| | | | | siNA (307C) inact2 | | |
| | | | | stab08 | | |
| 307 | UGAUAGGGUGCUUGCGAGUGCCC | 1446 | 34053 | HCVa:325L21 antisense | AcAcGcGcAAGuAcccucuTsT | 1893 |
| | | | | siNA (307C) inact3 | | |
| | | | | stab08 | | |
| 282 | UCGCGAAAGGCCUUGUGGUACUG | 1434 | 34054 | HCVa:282U21 sense | B cAuGGuGuuccGGAAAGcGTT B | 1894 |
| | | | | siNA inv stab07 | | |
| 283 | CGCGAAAGGCCUUGUGGUACUGC | 1435 | 34055 | HCVa:283U21 sense | B ucAuGGuGuuccGGAAAGcTT B | 1895 |
| | | | | siNA inv stab07 | | |
| 304 | GCCUGAUAGGGUGCUUGCGAGUG | 1444 | 34056 | HCVa:304U21 sense | B GAGcGuucGuGGGAuAGucTT B | 1896 |
| | | | | siNA inv stab07 | | |
| 307 | UGAUAGGGUGCUUGCGAGUGCCC | 1446 | 34057 | HCVa:307U21 sense | B cGuGAGcGuucGuGGGAuATT B | 1897 |
| | | | | siNA inv stab07 | | |
| 282 | UCGCGAAAGGCCUUGUGGUACUG | 1434 | 34058 | HCVa:300L21 antisense | cGcuuuccGGAAcAccAuGTsT | 1898 |
| | | | | siNA (282C) inv stab08 | | |
| 283 | CGCGAAAGGCCUUGUGGUACUGC | 1435 | 34059 | HCVa:301L21 antisense | GcuuuccGGAAcAccAuGATsT | 1899 |
| | | | | siNA (283C) inv stab08 | | |
| 304 | GCCUGAUAGGGUGCUUGCGAGUG | 1444 | 34060 | HCVa:322L21 antisense | GAcuAucccAcGAAcGcucTsT | 1900 |
| | | | | siNA (304C) inv stab08 | | |
| 307 | UGAUAGGGUGCUUGCGAGUGCCC | 1446 | 34061 | HCVa:325L21 antisense | uAucccAcGAAcGcucAcGTsT | 1901 |
| | | | | siNA (307C) inv stab08 | | |
| 82 | UAGCCAUGGCGUUAGUAUGAGUG | 1460 | 34128 | HCVb:100L18 (82C) 5′ | pUCAUACUAACGCCAUGGC | 1902 |
| | | | | p palindrome siNA | GUUAGUAUGAB | |
| 82 | UAGCCAUGGCGUUAGUAUGAGUG | 1460 | 34129 | HCVb:100L17 (82C) 5′ | pCAUACUAACGCCAUGGC | 1903 |
| | | | | p palindrome siNA | GUUAGUAUGB | |
| 82 | UAGCCAUGGCGUUAGUAUGAGUG | 1460 | 34130 | HCVb:100L16 (82C) 5′ | pAUACUAACGCCAUGGC | 1904 |
| | | | | p palindrome siNA | GUUAGUAUB | |
| 82 | UAGCCAUGGCGUUAGUAUGAGUG | 1460 | 34131 | HCVb:100L15 (82C) 5′ | pUACUAACGCCAUGGC | 1905 |
| | | | | p palindrome siNA | GUUAGUAB | |
| 126 | CCCUCCCGGGAGAGCCAUAGUGG | 1461 | 34132 | HCVb:144L19 (126C) 5′ | pACUAUGGCUCUCCCGGGAG | 1906 |
| | | | | p palindrome siNA | AGCCAUAGUB | |
| 126 | CCCUCCCGGGAGAGCCAUAGUGG | 1461 | 34133 | HCVb:144L18 (126C) 5′ | pCUAUGGCUCUCCCGGGAG | 1907 |
| | | | | p palindrome siNA | AGCCAUAGB | |
| 126 | CCCUCCCGGGAGAGCCAUAGUGG | 1461 | 34134 | HCVb:144L17 (126C) 5′ | pUAUGGCUCUCCCGGGAG | 1908 |
| | | | | p palindrome siNA | AGCCAUAB | |
| 126 | CCCUCCCGGGAGAGCCAUAGUGG | 1461 | 34135 | HCVb:144L16 (126C) 5′ | pAUGGCUCUCCCGGGAG | 1909 |
| | | | | p palindrome siNA | AGCCAUB | |
| 126 | CCCUCCCGGGAGAGCCAUAGUGG | 1461 | 34136 | HCVb:144L15 (126C) 5′ | pUGGCUCUCCCGGGAG | 1910 |
| | | | | p palindrome siNA | AGCCAB | |
| 155 | GAACCGGUGAGUACACCGGAAUU | 1432 | 34137 | HCVb:171L17 (155C) 5′ | pCCGGUGUACUCACCGGU | 1911 |
| | | | | p palindrome siNA | GAGUACACCGGB | |
| 155 | GAACCGGUGAGUACACCGGAAUU | 1432 | 34138 | HCVb:170L16 (155C) 5′ | pCGGUGUACUCACCGGU | 1912 |
| | | | | p palindrome siNA | GAGUACACCGB | |
| 155 | GAACCGGUGAGUACACCGGAAUU | 1432 | 34139 | HCVb:169L15 (155C) 5′ | pGGUGUACUCACCGGU | 1913 |
| | | | | p palindrome siNA | GAGUACACCB | |
| 315 | GCCCCGGGAGGUCUCGUAGACCG | 1416 | 34140 | HCVb:331L17 (315C) 5′ | pCUACGAGACCUCCCGGG | 1914 |
| | | | | p palindrome siNA | AGGUCUCGUAGB | |
| 315 | GCCCCGGGAGGUCUCGUAGACCG | 1416 | 34141 | HCVb:330L16 (315C) 5′ | pUACGAGACCUCCCGGG | 1915 |
| | | | | p palindrome siNA | AGGUCUCGUAB | |
| 315 | GCCCCGGGAGGUCUCGUAGACCG | 1416 | 34142 | HCVb:329L15 (315C) 5′ | pACGAGACCUCCCGGG | 1916 |
| | | | | p palindrome siNA | AGGUCUCGUB | |
| 327 | CCCCGGGAGGUCUCGUAGACCGU | 1417 | 34494 | HCVa:345L21 antisense | GGucuAcGAGAccucccGGTT B | 1917 |
| | | | | siNA (327C) stab19 | | |
| 327 | CCCCGGGAGGUCUCGUAGACCGU | 1417 | 34495 | HCVa:345L21 antisense | GGCCcuccAGAGcAucuGGTT B | 1918 |
| | | | | siNA (327C) inv stab19 | | |
| 304 | GCCUGAUAGGGUGCUUGCGAGUG | 1444 | 34496 | HCVa:322L21 antisense | cucGcAAGcAcccuAucAGTT B | 1919 |
| | | | | siNA (304C) stab19 | | |
| 304 | GCCUGAUAGGGUGCUUGCGAGUG | 1444 | 34499 | HCVa:322L21 antisense | GAcuAucccAcGAAcGcucTT B | 1920 |
| | | | | siNA (304C) inv stab19 | | |
| 282 | UCGCGAAAGGCCUUGUGGUACUG | 1434 | 34581 | HCVa:282U21 sense | GCGAAAGGCCUUGUGGUACTT | 1921 |
| | | | | siNA stab00 | | |
| 283 | CGCGAAAGGCCUUGUGGUACUGC | 1435 | 34582 | HCVa:283U21 sense | CGAAAGGCCUUGUGGUACUTT | 1922 |
| | | | | siNA stab00 | | |
| 304 | GCCUGAUAGGGUGCUUGCGAGUG | 1444 | 34583 | HCVa:304U21 sense | CUGAUAGGGUGCUUGCGAGTT | 1923 |
| | | | | siNA stab00 | | |
| 307 | UGAUAGGGUGCUUGCGAGUGCCC | 1446 | 34584 | HCVa:307U21 sense | AUAGGGUGCUUGCGAGUGCTT | 1924 |
| | | | | siNA stab00 | | |
| 327 | CCCCGGGAGGUCUCGUAGACCGU | 1417 | 34585 | HCVa:327U21 sense | CCGGGAGGUCUCGUAGACCTT | 1925 |
| | | | | siNA stab00 | | |
| 282 | UCGCGAAAGGCCUUGUGGUACUG | 1434 | 34586 | HCVa:300L21 antisense | GUACCACAAGGCCUUUCGCTT | 1926 |
| | | | | siNA (282C) stab00 | | |
| 283 | CGCGAAAGGCCUUGUGGUACUGC | 1435 | 34587 | HCVa:301L21 antisense | AGUACCACAAGGCCUUUCGTT | 1927 |
| | | | | siNA (283C) stab00 | | |
| 304 | GCCUGAUAGGGUGCUUGCGAGUG | 1444 | 34588 | HCVa:322L21 antisense | CUCGCAAGCACCCUAUCAGTT | 1928 |
| | | | | siNA (304C) stab00 | | |
| 307 | UGAUAGGGUGCUUGCGAGUGCCC | 1446 | 34589 | HCVa:325L21 antisense | GCACUCGCAAGCACCCUAUTT | 1929 |
| | | | | siNA (307C) stab00 | | |
| 282 | UCGCGAAAGGCCUUGUGGUACUG | 1434 | 34590 | HCVa:282U21 sense siNA | CAUGGUGUUCCGGAAAGCGTT | 1930 |
| | | | | inv stab00 | | |
| 283 | CGCGAAAGGCCUUGUGGUACUGC | 1435 | 34591 | HCVa:283U21 sense siNA | UCAUGGUGUUCCGGAAAGCTT | 1931 |
| | | | | inv stab00 | | |
| 304 | GCCUGAUAGGGUGCUUGCGAGUG | 1444 | 34592 | HCVa:304U21 sense siNA | GAGCGUUCGUGGGAUAGUCTT | 1932 |
| | | | | inv stab00 | | |
| 307 | UGAUAGGGUGCUUGCGAGUGCCC | 1446 | 34593 | HCVa:307U21 sense siNA | CGUGAGCGUUCGUGGGAUATT | 1933 |
| | | | | inv stab00 | | |
| 327 | CCCCGGGAGGUCUCGUAGACCGU | 1417 | 34594 | HCVa:327U21 sense siNA | CCAGAUGCUCUGGAGGGCCTT | 1934 |
| | | | | inv stab00 | | |
| 282 | UCGCGAAAGGCCUUGUGGUACUG | 1434 | 34595 | HCVa:300L21 antisense | CGCUUUCCGGAACACCAUGTT | 1935 |
| | | | | siNA (282C) inv stab00 | | |
| 283 | CGCGAAAGGCCUUGUGGUACUGC | 1435 | 34596 | HCVa:301L21 antisense | GCUUUCCGGAACACCAUGATT | 1936 |
| | | | | siNA (283C) inv stab00 | | |
| 304 | GCCUGAUAGGGUGCUUGCGAGUG | 1444 | 34597 | HCVa:322L21 antisense | GACUAUCCCACGAACGCUCTT | 1937 |
| | | | | siNA (304C) inv stab00 | | |
| 307 | UGAUAGGGUGCUUGCGAGUGCCC | 1446 | 34598 | HCVa:325L21 antisense | UAUCCCACGAACGCUCACGTT | 1938 |
| | | | | siNA (307C) inv stab00 | | |
| 327 | CCCCGGGAGGUCUCGUAGACCGU | 1417 | 34599 | HCVa:345L21 antisense | GGCCCUCCAGAGCAUCUGGTT | 1939 |
| | | | | siNA (327C) inv stab00 | | |
| 327 | CCCCGGGAGGUCUCGUAGACCGU | 1417 | 35173 | HCVa:327U21 sense | B ccGGGAGGucucGUAGACCTT B | 1940 |
| | | | | siNA stab07 N1 | | |
| 327 | CCCCGGGAGGUCUCGUAGACCGU | 1417 | 35174 | HCVa:345L21 antisense | GGucuAcGAGAccucccGGTsT | 1941 |
| | | | | siNA (327C) stab08 N1 | | |
| 327 | CCCCGGGAGGUCUCGUAGACCGU | 1417 | 35175 | HCVa:345L21 antisense | GGucuAcGAGAccucccGGTsT | 1942 |
| | | | | siNA (327C) stab25 | | |
| 327 | CCCCGGGAGGUCUCGUAGACCGU | 1417 | 35176 | HCVa:345L21 antisense | GGucuAcGAGAccucccGGTsT | 1943 |
| | | | | siNA (327C) stab08 N3 | | |
| 327 | CCCCGGGAGGUCUCGUAGACCGU | 1417 | 35177 | HCVa:345L21 antisense | GGucuAcGAGAccucccGGTsT | 1944 |
| | | | | siNA (327C) stab24 | | |
| 304 | GCCUGAUAGGGUGCUUGCGAGUG | 1444 | 35178 | HCVa:304U21 sense | B cuGAuAGGGuGcuuGcGAGTT B | 1945 |
| | | | | siNA stab07 N1 | | |
| 304 | GCCUGAUAGGGUGCUUGCGAGUG | 1444 | 35179 | HCVa:322L21 antisense | CUCGCAAGcAcccuAucAGTsT | 1946 |
| | | | | siNA (304C) stab08 N1 | | |
| 304 | GCCUGAUAGGGUGCUUGCGAGUG | 1444 | 35180 | HCVa:322121 antisense | CUCGcAAGcAcccuAucAGTsT | 1947 |
| | | | | siNA (304C) stab25 | | |
| 304 | GCCUGAUAGGGUGCUUGCGAGUG | 1444 | 35181 | HCVa:322L21 antisense | CUcGcAAGcAcccuAucAGTsT | 1948 |
| | | | | siNA (304C) stab08 N3 | | |
| 304 | GCCUGAUAGGGUGCUUGCGAGUG | 1444 | 35182 | HCVa:322L21 antisense | CucGcAAGcAcccuAucAGTsT | 1949 |
| | | | | siNA (304C) stab24 | | |
| 327 | CCCCGGGAGGUCUCGUAGACCGU | 1417 | 35225 | HCVa:327 siNA stab0/0 | GGUCUACGAGACCUCCCGG | 1950 |
| | | | | Pal01 | CCGGGAGGUCUCGUAGACC | |
| 327 | CCCCGGGAGGUCUCGUAGACCGU | 1417 | 35226 | HCVa:327 siNA stab0/0 | GGUCUACGAGACCUCCCGG | 1951 |
| | | | | Pal02 | CCGGGAGGUCUCGUAGACCTT | |
| 327 | CCCCGGGAGGUCUCGUAGACCGU | 1417 | 35227 | HCVa:327 siNA stab0/0 | GGUCUACGAGACCUCCCG | 1952 |
| | | | | Pal03 | CGGGAGGUCUCGUAGACC | |
| 327 | CCCCGGGAGGUCUCGUAGACCGU | 1417 | 35228 | HCVa:327 siNA stab0/0 | GGUCUACGAGACCUCCCG | 1953 |
| | | | | Pal04 | CGGGAGGUCUCGUAGACCTT | |
| 327 | CCCCGGGAGGUCUCGUAGACCGU | 1417 | 35229 | HCVa:327 siNA stab0/0 | GGUCUACGAGACCUCCC | 1954 |
| | | | | Pal05 | GGGAGGUCUCGUAGACC | |
| 327 | CCCCGGGAGGUCUCGUAGACCGU | 1417 | 35230 | HCVa:327 siNA stab0/0 | GGUCUACGAGACCUCCC | 1955 |
| | | | | Pal06 | GGGAGGUCUCGUAGACCTT | |
| 327 | CCCCGGGAGGUCUCGUAGACCGU | 1417 | 35231 | HCVa:327 siNA stab0/0 | GGUCUACGAGACCUCC | 1956 |
| | | | | Pal07 | GGAGGUCUCGUAGACC | |
| 327 | CCCCGGGAGGUCUCGUAGACCGU | 1417 | 35232 | HCVa:327 siNA stab0/0 | GGUCUACGAGACCUCC | 1957 |
| | | | | Pal08 | GGAGGUCUCGUAGACCTT | |
| 327 | CCCCGGGAGGUCUCGUAGACCGU | 1417 | 35235 | HCVa:327 siNA stab0/0 | GUCUACGAGACCUCCCGG | 1958 |
| | | | | Pal11 | GAGGUCUCGUAGAC | |
| 327 | CCCCGGGAGGUCUCGUAGACCGU | 1417 | 35236 | HCVa:327 siNA stab0/0 | GUCUACGAGACCUCCCGG | 1959 |
| | | | | Pal12 | GAGGUCUCGUAGACTT | |
| 327 | CCCCGGGAGGUCUCGUAGACCGU | 1417 | 35237 | HCVa:327 siNA stab0/0 | UCUACGAGACCUCCCGG | 1960 |
| | | | | Pal13 | GAGGUCUCGUAGA | |
| 327 | CCCCGGGAGGUCUCGUAGACCGU | 1417 | 35238 | HCVa:327 siNA stab0/0 | UCUACGAGACCUCCCGG | 1961 |
| | | | | Pal14 | GAGGUCUCGUAGATT | |
| 327 | CCCCGGGAGGUCUCGUAGACCGU | 1417 | 35239 | HCVa:327 siNA | CUACGAGACCUCCCGG | 1962 |
| | | | | stab0/0 Pal15 | GAGGUCUCGUAG | |
| 327 | CCCCGGGAGGUCUCGUAGACCGU | 1417 | 35240 | HCVa:327 siNA | CUACGAGACCUCCCGG | 1963 |
| | | | | stab0/0 Pal16 | GAGGUCUCGUAGTT | |
| 327 | CCCCGGGAGGUCUCGUAGACCGU | 1417 | 35241 | HCVa:327 siNA | GGUCUACGAGACCUCCAGG | 1964 |
| | | | | stab0/0 Pal17 | UCUCGUAGACC | |
| 327 | CCCCGGGAGGUCUCGUAGACCGU | 1417 | 35242 | HCVa:327 siNA | GGUCUACGAGACCUCCAGG | 1965 |
| | | | | stab0/0 Pal18 | UCUCGUAGACCTT | |
| 327 | CCCCGGGAGGUCUCGUAGACCGU | 1417 | 35243 | HCVa:327 siNA | GGUCUACGAGACCUCGAGG | 1966 |
| | | | | stab0l0 Pal19 | UCUCGUAGACC | |
| 327 | CCCCGGGAGGUCUCGUAGACCGU | 1417 | 35244 | HCVa:327 siNA | GGUCUACGAGACCUCGAGG | 1967 |
| | | | | stab0/0 Pal20 | UCUCGUAGACCTT | |
| 327 | CCCCGGGAGGUCUCGUAGACCGU | 1417 | 35245 | HCVa:327 siNA | GGUCUACGAGACCUGCAGG | 1968 |
| | | | | stab0/0 Pal21 | UCUCGUAGACC | |
| 327 | CCCCGGGAGGUCUCGUAGACCGU | 1417 | 35246 | HCVa:327 siNA | GGUCUACGAGACCUGCAGG | 1969 |
| | | | | stab0/0 Pal22 | UCUCGUAGACCTT | |
| 304 | GCCUGAUAGGGUGCUUGCGAGUG | 1444 | 35247 | HCVa:304 siNA | GACUAUCCCACGAACGCUC | 1970 |
| | | | | stab0/0 Pal01 | GAGCGUUCGUGGGAUAGUCTT | |
| 304 | GCCUGAUAGGGUGCUUGCGAGUG | 1444 | 35248 | HCVa:304 siNA | GACUAUCCCACGAACGCUC | 1971 |
| | | | | stab0/0 Pal02 | GAGCGUUCGUGGGAUAGUC | |
| 304 | GCCUGAUAGGGUGCUUGCGAGUG | 1444 | 35249 | HCVa:304 siNA | GACUAUCCCACGAACGCGU | 1972 |
| | | | | stab0/0 Pal03 | UCGUGGGAUAGUCTT | |
| 304 | GCCUGAUAGGGUGCUUGCGAGUG | 1444 | 35250 | HCVa:304 siNA | GACUAUCCCACGAACGCGU | 1973 |
| | | | | stab0/0 Pal04 | UCGUGGGAUAGUC | |
| 304 | GCCUGAUAGGGUGCUUGCGAGUG | 1444 | 35251 | HCVa:304 siNA | GACUAUCCCACGAACGUUC | 1974 |
| | | | | stab0/0 Pal05 | GUGGGAUAGUCTT | |
| 304 | GCCUGAUAGGGUGCUUGCGAGUG | 1444 | 35252 | HCVa:304 siNA | GACUAUCCCACGAACGUUC | 1975 |
| | | | | stab0/0 Pal06 | GUGGGAUAGUC | |
| 304 | GCCUGAUAGGGUGCUUGCGAGUG | 1444 | 35253 | HCVa:304 siNA | ACUAUCCCACGAACGUUC | 1976 |
| | | | | stab0/0 Pal07 | GUGGGAUAGUTT | |
| 304 | GCCUGAUAGGGUGCUUGCGAGUG | 1444 | 35254 | HCVa:304 siNA | ACUAUCCCACGAACGUUC | 1977 |
| | | | | stab0/0 Pal08 | GUGGGA | |
| 327 | CCCCGGGAGGUCUCGUAGACCGU | 1462 | 36414 | HCVa bf-L-21 siNA | CCGGGAGGUCUCGUAGACCTT L | 1978 |
| | UCGCGAAAGGCCUUGUGGUACUG | | | stab00 | GCGAAAGGCCUUGUGGUACTT | |
| | | | | [HCVa:327U21 sense | | |
| | | | | o18S | | |
| | | | | HCVa:282U21 sense] | | |
| 327 | CCCCGGGAGGUCUCGUAGACCGU | 1463 | 36415 | HCVa bf-L-22 siNA | CCGGGAGGUCUCGUAGACCTT L | 1979 |
| | UGAUAGGGUGCUUGCGAGUGCCC | | | stab00 [HCVa:327U21 | AUAGGGUGCUUGCGAGUGCTT | |
| | | | | sense o18S HCVa: | | |
| | | | | 307U21 sense] | | |
| 307 | UGAUAGGGUGCUUGCGAGUGCCC | 1464 | 36430 | HCVa bf-L-20 siNA | AUAGGGUGCUUGCGAGUGCTT L | 1980 |
| | UCGCGAAAGGCCUUGUGGUACUG | | | stab00 ]HCVa:307U21 | GCGAAAGGCCUUGUGGUACTT | |
| | | | | sense o18S HCVa: | | |
| | | | | 282U21 sense] | | |
| 307 | UGAUAGGGUGCUUGCGAGUGCCC | 1446 | 36438 | HCVa:307U21 sense | AUAGGGUGCUUGCGAGUGCTT | 1924 |
| | | | | siNA stab00 | | |
| 307 | UGAUAGGGUGCUUGCGAGUGCCC | 1446 | 36446 | HCVa:325L21 antisense | GCACUCGCAAGCACCCUAUTT | 1929 |
| | | | | siNA (307C) stab00 | | |
| 327 | CCCCGGGAGGUCUCGUAGACCGU | 1417 | 36447 | HCVa:345L21 antisense | GGUCUACGAGACCUCCCGGTT | 1732 |
| | | | | siNA (327C) stab00 | | |
| 304 | GCCUGAUAGGGUGCUUGCGAGUG | 1444 | 36727 | HCVa:304U21 sense | B CUGAUAGGGUGCUUGCGAGTT B | 1981 |
| | | | | siNA stab09 | | |
| 304 | GCCUGAUAGGGUGCUUGCGAGUG | 1444 | 36728 | HCVa:322L21 antisense | CUCGCAAGCACCCUAUCAGTsT | 1982 |
| | | | | siNA (304C) stab10 | | |
| 304 | GCCUGAUAGGGUGCUUGCGAGUG | 1444 | 37010 | HCVa:304U21 sense | B cuGAuAGGGuGcuuGcGAGTT B | 1983 |
| | | | | siNA stab04 | | |
| 304 | GCCUGAUAGGGUGCUUGCGAGUG | 1444 | 37011 | HCVa:322L21 antisense | cucGcAAGcAcccuAucAGTsT | 1984 |
| | | | | siNA (304C) stab05 | | |
| 307 | CCCCGGGAGGUCUCGUAGACCGU | 1463 | 37781 | HCVa bf-L-22 siNA stab07 | B ccGGGAGGucucGuAGAccTT L | |
| | UGAUAGGGUGCUUGCGAGUGCCC | | | [HCVa:327U21 sense o18S | AuAGGGuGcuuGcGAGuGcTT B | 1985 |
| | | | | HCVa:307U21 sense] | | |
| 307 | UGAUAGGGUGCUUGCGAGUGCCC | 1446 | 37790 | HCVa:325L21 antisense | GCAcucGcAAGcAcccuAuTT | 1986 |
| | | | | siNA (307C) stab26 | | |
| 327 | CCCCGGGAGGUCUCGUAGACCGU | 1417 | 37791 | HCVa:345L21 antisense | GGUcuAcGAGAccucccGGTT | 1987 |
| | | | | siNA (327C) stab26 | | |
| 282 | UCGCGAAAGGCCUUGUGGUACUG | 1434 | 38279 | HCVa:300L21 antisense | GUAccAcAAGGccuuucGcTsT | 1988 |
| | | | | siNA (282C) stab25 | | |
| 283 | CGCGAAAGGCCUUGUGGUACUGC | 1435 | 38280 | HCVa:301L21 antisense | AGUACCAcAAGGccuuucGTsT | 1989 |
| | | | | siNA (283C) stab25 | | |
| 307 | UGAUAGGGUGCUUGCGAGUGCCC | 1446 | 38281 | HCVa:325L21 antisense | GCAcucGcAAGcAcccuAuTsT | 1990 |
| | | | | siNA (307C) stab25 | | |
| 304 | GCCUGAUAGGGUGCUUGCGAGUG | 1444 | 38283 | HCVa:322L21 antisense | CUCGcAAGcAcccuAucAGTT | 1991 |
| | | | | siNA (304C) stab26 | | |
| 304 | GCCUGAUAGGGUGCUUGCGAGUG | 1444 | 38284 | HCVa:322L21 antisense | CUCGcAAGcAcccuAucAGTTB | 1992 |
| | | | | siNA (304C) stab27 | | |
| 282 | UCGCGAAAGGCCUUGUGGUACUG | 1434 | 38293 | HCVa:300L21 antisense | GuAccAcAAGGccuuucGcTT B | 1993 |
| | | | | siNA (282C) stab19 | | |
| 282 | UCGCGAAAGGCCUUGUGGUACUG | 1434 | 38294 | HCVa:300121 antisense | GUAccAcAAGGccuuucGcTT | 1994 |
| | | | | siNA (282C) stab26 | | |
| 282 | UCGCGAAAGGCCUUGUGGUACUG | 1434 | 38295 | HCVa:300121 antisense | GUACCAcAAGGccuuucGcTT B | 1995 |
| | | | | siNA (282C) stab27 | | |
| 282 | UCGCGAAAGGCCUUGUGGUACUG | 1434 | 38296 | HCVa:300121 antisense | GuAccAcAAGGccuuucGcTsT | 1996 |
| | | | | siNA (282C) stab29 | | |
| 282 | UCGCGAAAGGCCUUGUGGUACUG | 1434 | 38297 | HCVa:300121 antisense | GuAccAcAAGGccuuucGcTT | 1997 |
| | | | | siNA (282C) stab30 | | |
| 282 | UCGCGAAAGGCCUUGUGGUACUG | 1434 | 38298 | HCVa:300121 antisense | GuAccAcAAGGccuuucGcTT B | 1998 |
| | | | | siNA (282C) stab31 | | |
| 282 | UCGCGAAAGGCCUUGUGGUACUG | 1434 | 38299 | HCVa:300121 antisense | GuAccAcAAGGccuuucGcTT | 1999 |
| | | | | siNA (282C) stab32 | | |
| 304 | GCCUGAUAGGGUGCUUGCGAGUG | 1444 | 38300 | HCVa:322121 antisense | cucGcAAGcAcccuAucAGTT | 2000 |
| | | | | siNA (304C) stab32 | | |
| 327 | CCCCGGGAGGUCUCGUAGACCGU | 1417 | 38301 | HCVa:345L21 antisense | GGUcuAcGAGAccucccGGTT B | 2001 |
| | | | | siNA (327C) stab27 | | |
| 327 | CCCCGGGAGGUCUCGUAGACCGU | 1417 | 38302 | HCVa:345121 antisense | GGucuAcGAGAccuccc+EE,uns GGTT | 2002 |
| | | | | siNA (327C) stab30 | | |
| 327 | CCCCGGGAGGUCUCGUAGACCGU | 1417 | 38303 | HCVa:345121 antisense | GGucuAcGAGAccucccGGTT B | 2003 |
| | | | | siNA (327C) stab31 | | |
| 327 | CCCCGGGAGGUCUCGUAGACCGU | 1417 | 38304 | HCVa:345L21 antisense | GGucuAcGAGAccucccGGTT | 2004 |
| | | | | siNA (327C) stab32 | | |
| 304 | CCCCGGGAGGUCUCGUAGACCGU | 1465 | 38310 | HCV bf-L-23 siNA | CCGGGAGGUCUCGUAGACCTT L | 2005 |
| | GCCUGAUAGGGUGCUUGCGAGUG | | | stab00 ]HCV:327U21 | CUGAUAGGGUGCUUGCGAGTT | |
| | | | | sense o18S HCV: | | |
| | | | | 304U21 sense] | | |
| 282 | GCCUGAUAGGGUGCUUGCGAGUG | 1466 | 38311 | HCV bf-L-24 siNA | CUGAUAGGGUGCUUGCGAGTT L | 2006 |
| | UCGCGAAAGGCCUUGUGGUACUG | | | stab00 [HCV:304U21 | GCGAAAGGCCUUGUGGUACTT | |
| | | | | sense o18S HCV: | | |
| | | | | 282U21 sense] | | |
| 304 | CCCCGGGAGGUCUCGUAGACCGU | 1465 | 38312 | HCV bf-L-23 siNA | B ccGGGAGGucucGuAGAccTT L | 2007 |
| | GCCUGAUAGGGUGCUUGCGAGUG | | | stab07 [HCV:327U21 | cuGAuAGGGuGcuuGcGAGTT B | |
| | | | | sense o18S HCV: | | |
| | | | | 304U21 sense] | | |
| 282 | CCCCGGGAGGUCUCGUAGACCGU | 1462 | 38313 | HCV bf-L-21 siNA | B ccGGGAGGucucGuAGAccTT L | 2008 |
| | UCGCGAAAGGCCUUGUGGUACUG | | | stab07 [HCVa:327U21 | GcGAAAGGccuuGuGGuAcTT B | |
| | | | | sense o18S HCVa: | | |
| | | | | 282U21 sense] | | |
| 282 | GCCUGAUAGGGUGCUUGCGAGUG | 1466 | 38314 | HCV bf-L-24 siNA | B cuGAuAGGGuGcuuGcGAGTT L | 2009 |
| | UCGCGAAAGGCCUUGUGGUACUG | | | stab07 [HCV:304U21 | GcGAAAGGccuuGuGGuAcTT B | |
| | | | | sense o18S HCV: | | |
| | | | | 282U21 sense] | | |
| 304 | GCCUGAUAGGGUGCUUGCGAGUG | 1444 | 38758 | HCVa:322L21 siRNA | CUCGcAAGcAcccuAucAGUU | 2010 |
| | | | | (304C) stab26 | | |
| 327 | CCCCGGGAGGUCUCGUAGACCGU | 1417 | 38759 | HCVa:345L21 siRNA | GGUcuAcGAGAccucccGGUU | 2011 |
| | | | | (327C) stab26 | | |
| 304 | GCCUGAUAGGGUGCUUGCGAGUG | 1444 | 46211 | HCVa:322L21 siRNA | CUCGcAAGcAcccuAucAGGC | 2012 |
| | | | | (304C) stab26 | | |
| 327 | CCCCGGGAGGUCUCGUAGACCGU | 1417 | 46214 | HCVa:345L21 siRNA | GGUcuAcGAGAccucccGGGC | 2013 |
| | | | | (327C) stab26 | | |

Uppercase = ribonucleotide
u,c = 2′-deoxy-2′-fluoro U,C
T = thymidine
B = inverted deoxy abasic
s = phosphorothioate linkage
A = deoxy Adenosine
G = deoxy Guanosine
G = 2′-O-methyl Guanosine
A = 2′-O-methyl Adenosine
L = hegS = hexethelyne glycol spacer; spacer-18 (Glen Research 10-1918-xx)
p = terminal phosphate

[0683] TABLE IV
Non-limiting examples of Stabilization Chemistries
for chemically modified siNA constructs

| Chemistry | pyrimidine | Purine | cap | p = S | Strand |
|---|---|---|---|---|---|
| “Stab 00” | Ribo | Ribo | TT at 3′-ends | | S/AS |
| “Stab 1” | Ribo | Ribo | — | 5 at 5′-end | S/AS |
| | | | | 1 at 3′-end | |
| “Stab 2” | Ribo | Ribo | — | All linkages | Usually AS |
| “Stab 3” | 2′-fluoro | Ribo | — | 4 at 5′-end | Usually S |
| | | | | 4 at 3′-end | |
| “Stab 4” | 2′-fluoro | Ribo | 5′ and 3′-ends | — | Usually S |
| “Stab 5” | 2′-fluoro | Ribo | — | 1 at 3′-end | Usually AS |
| “Stab 6” | 2′-O-Methyl | Ribo | 5′ and 3′- | — | Usually S |
| | | | ends | | |
| “Stab 7” | 2′-fluoro | 2′-deoxy | 5′ and 3′- | — | Usually S |
| | | | ends | | |
| “Stab 8” | 2′-fluoro | 2′-O-Methyl | — | 1 at 3′-end | S/AS |
| “Stab 9” | Ribo | Ribo | 5′ and 3′- | — | Usually S |
| | | | ends | | |
| “Stab 10” | Ribo | Ribo | — | 1 at 3′-end | Usually AS |
| “Stab 11” | 2′-fluoro | 2′-deoxy | — | 1 at 3′-end | Usually AS |
| “Stab 12” | 2′-fluoro | LNA | 5′ and 3′-ends | | Usually S |
| “Stab 13” | 2′-fluoro | LNA | | 1 at 3′-end | Usually AS |
| “Stab 14” | 2′-fluoro | 2′-deoxy | | 2 at 5′-end | Usually AS |
| | | | | 1 at 3′-end | |
| “Stab 15” | 2′-deoxy | 2′-deoxy | | 2 at 5′-end | Usually AS |
| | | | | 1 at 3′-end | |
| “Stab 16” | Ribo | 2′-O-Methyl | 5′ and 3′- | | Usually S |
| | | | ends | | |
| “Stab 17” | 2′-O-Methyl | 2′-O-Methyl | 5′ and 3′-ends | | Usually S |
| “Stab 18” | 2′-fluoro | 2′-O-Methyl | 5′ and 3′-ends | | Usually S |
| “Stab 19” | 2′-fluoro | 2′-O-Methyl | 3′-end | | S/AS |
| “Stab 20” | 2′-fluoro | 2′-deoxy | 3′-end | | Usually AS |
| “Stab 21” | 2′-fluoro | Ribo | 3′-end | | Usually AS |
| “Stab 22” | Ribo | Ribo | 3′-end | | Usually AS |
| “Stab 23” | 2′-fluoro* | 2′-deoxy* | 5′ and 3′-ends | | Usually S |
| “Stab 24” | 2′-fluoro* | 2′-O-Methyl* | — | 1 at 3′-end | S/AS |
| “Stab 25” | 2′-fluoro* | 2′-O-Methyl* | — | 1 at 3′-end | S/AS |
| “Stab 26” | 2′-fluoro* | 2′-O- | — | | S/AS |
| | | Methyl* | | | |
| “Stab 27” | 2′-fluoro* | 2′-O- | 3′-end | | S/AS |
| | | Methyl* | | | |
| “Stab 28” | 2′-fluoro* | 2′-O- | 3′-end | | S/AS |
| | | Methyl* | | | |
| “Stab 29” | 2′-fluoro* | 2′-O- | | 1 at 3′-end | S/AS |
| | | Methyl* | | | |
| “Stab 30” | 2′-fluoro* | 2′-O- | | | S/AS |
| | | Methyl* | | | |
| “Stab 31” | 2′-fluoro* | 2′-O- | 3′-end | | S/AS |
| | | Methyl* | | | |
| “Stab 32” | 2′-fluoro | 2′-O- | | | S/AS |
| | | Methyl | | | |
| “Stab 33” | 2′-fluoro | 2′-deoxy* | 5′ and 3′- | — | Usually S |
| | | | ends | | |
| “Stab 34” | 2′-fluoro | 2′-O- | 5′ and 3′- | | Usually S |
| | | Methyl* | ends | | |
| “Stab 3F” | 2′-OCF3 | Ribo | — | 4 at 5′-end | Usually S |
| | | | | 4 at 3′-end | |
| “Stab 4F” | 2′-OCF3 | Ribo | 5′ and 3′- | — | Usually S |
| | | | ends | | |
| “Stab 5F” | 2′-OCF3 | Ribo | — | 1 at 3′-end | Usually AS |
| “Stab 7F” | 2′-OCF3 | 2′-deoxy | 5′ and 3′- | — | Usually S |
| | | | ends | | |
| “Stab 8F” | 2′-OCF3 | 2′-O- | — | 1 at 3′-end | S/AS |
| | | Methyl | | | |
| “Stab 11F” | 2′-OCF3 | 2′-deoxy | — | 1 at 3′-end | Usually AS |
| “Stab 12F” | 2′-OCF3 | LNA | 5′ and 3′- | | Usually S |
| | | | ends | | |
| “Stab 13F” | 2′-OCF3 | LNA | | 1 at 3′-end | Usually AS |
| “Stab 14F” | 2′-OCF3 | 2′-deoxy | | 2 at 5′-end | Usually AS |
| | | | | 1 at 3′-end | |
| “Stab 15F” | 2′-OCF3 | 2′-deoxy | | 2 at 5′-end | Usually AS |
| | | | | 1 at 3′-end | |
| “Stab 18F” | 2′-OCF3 | 2′-O- | 5′ and 3′- | | Usually S |
| | | Methyl | ends | | |
| “Stab 19F” | 2′-OCF3 | 2′-O- | 3′-end | | S/AS |
| | | Methyl | | | |
| “Stab 20F” | 2′-OCF3 | 2′-deoxy | 3′-end | | Usually AS |
| “Stab 21F” | 2′-OCF3 | Ribo | 3′-end | | Usually AS |
| “Stab 23F” | 2′-OCF3* | 2′-deoxy* | 5′ and 3′- | | Usually S |
| | | | ends | | |
| “Stab 24F” | 2′-OCF3* | 2′-O- | — | 1 at 3′-end | S/AS |
| | | Methyl* | | | |
| “Stab 25F” | 2′-OCF3* | 2′-O- | — | 1 at 3′-end | S/AS |
| | | Methyl* | | | |
| “Stab 26F” | 2′-OCF3* | 2′-O- | — | | S/AS |
| | | Methyl* | | | |
| “Stab 27F” | 2′-OCF3* | 2′-O- | 3′-end | | S/AS |
| | | Methyl* | | | |
| “Stab 28F” | 2′-OCF3* | 2′-O- | 3′-end | | S/AS |
| | | Methyl* | | | |
| “Stab 29F” | 2′-OCF3* | 2′-O- | | 1 at 3′-end | S/AS |
| | | Methyl* | | | |
| “Stab 30F” | 2′-OCF3* | 2′-O- | | | S/AS |
| | | Methyl* | | | |
| “Stab 31F” | 2′-OCF3* | 2′-O- | 3′-end | | S/AS |
| | | Methyl* | | | |
| “Stab 32F” | 2′-OCF3 | 2′-O- | | | S/AS |
| | | Methyl | | | |
| “Stab 33F” | 2′-OCF3 | 2′-deoxy* | 5′ and 3′- | — | Usually S |
| | | | ends | | |
| “Stab 34F” | 2′-OCF3 | 2′-O- | 5′ and 3′- | | Usually S |
| | | Methyl* | ends | | |

CAP = any terminal cap, see for example FIG. 10.
All Stab 00-34 chemistries can comprise 3′-terminal thymidine (TT) residues
All Stab 00-34 chemistries typically comprise about 21 nucleotides, but can vary as described herein.
All Stab 00-34 chemistries can also include a single ribonucleotide in the sense or passenger strand at the 11^{th} base paired position of the double stranded nucleic acid duplex as determined from the 5′-end of the antisense or guide strand (see FIG. 6C)
S = sense strand
AS = antisense strand
*Stab 23 has a single ribonucleotide adjacent to 3′-CAP
*Stab 24 and Stab 28 have a single ribonucleotide at 5′-terminus
*Stab 25, Stab 26, and Stab 27 have three ribonucleotides at 5′-terminus
*Stab 29, Stab 30, Stab 31, Stab 33, and Stab 34 any purine at first three nucleotide positions from 5′-terminus are ribonucleotides
p = phosphorothioate linkage

[0684] TABLE V

| | | | | | |
|---|---|---|---|---|---|
| | | | | Wait Time* | |
| Reagent | Equivalents | Amount | Wait Time* DNA | 2′-O-methyl | Wait Time* RNA |

A. 2.5 μmol Synthesis Cycle ABI 394 Instrument

| | | | | | | | | | |
|---|---|---|---|---|---|---|---|---|---|
| Phosphoramidites | 6.5 | 163 | μL | 45 | sec | 2.5 | min | 7.5 | min |
| S-Ethyl Tetrazole | 23.8 | 238 | μL | 45 | sec | 2.5 | min | 7.5 | min |
| Acetic Anhydride | 100 | 233 | μL | 5 | sec | 5 | sec | 5 | sec |
| N-Methyl | 186 | 233 | μL | 5 | sec | 5 | sec | 5 | sec |
| Imidazole | | | | | | | | | |
| TCA | 176 | 2.3 | mL | 21 | sec | 21 | sec | 21 | sec |
| Iodine | 11.2 | 1.7 | mL | 45 | sec | 45 | sec | 45 | sec |
| Beaucage | 12.9 | 645 | μL | 100 | sec | 300 | sec | 300 | sec |

| | | | | | | |
|---|---|---|---|---|---|---|
| Acetonitrile | NA | 6.67 | mL | NA | NA | NA |

B. 0.2 μmol Synthesis Cycle ABI 394 Instrument

| | | | | | | | | | |
|---|---|---|---|---|---|---|---|---|---|
| Phosphoramidites | 15 | 31 | μL | 45 | sec | 233 | sec | 465 | sec |
| S-Ethyl Tetrazole | 38.7 | 31 | μL | 45 | sec | 233 | min | 465 | sec |
| Acetic Anhydride | 655 | 124 | μL | 5 | sec | 5 | sec | 5 | sec |
| N-Methyl | 1245 | 124 | μL | 5 | sec | 5 | sec | 5 | sec |
| Imidazole | | | | | | | | | |
| TCA | 700 | 732 | μL | 10 | sec | 10 | sec | 10 | sec |
| Iodine | 20.6 | 244 | μL | 15 | sec | 15 | sec | 15 | sec |
| Beaucage | 7.7 | 232 | μL | 100 | sec | 300 | sec | 300 | sec |

| | | | | | | |
|---|---|---|---|---|---|---|
| Acetonitrile | NA | 2.64 | mL | NA | NA | NA |

C. 0.2 μmol Synthesis Cycle 96 well Instrument

| | Equivalents: | | | | | | | Wait | |
|---|---|---|---|---|---|---|---|---|---|
| | DNA/2′-O- | Amount: DNA/ | | Wait Time* | | Wait Time* | | Time* | |
| Reagent | methyl/Ribo | 2′-O-methyl/Ribo | | DNA | | 2′-O-methyl | | Ribo | |
| Phosphoramidites | 22/33/66 | 40/60/120 | μL | 60 | sec | 180 | sec | 360 | sec |
| S-Ethyl Tetrazole | 70/105/210 | 40/60/120 | μL | 60 | sec | 180 | min | 360 | sec |
| Acetic Anhydride | 265/265/265 | 50/50/50 | μL | 10 | sec | 10 | sec | 10 | sec |
| N-Methyl | 502/502/502 | 50/50/50 | μL | 10 | sec | 10 | sec | 10 | sec |
| Imidazole | | | | | | | | | |
| TCA | 238/475/475 | 250/500/500 | μL | 15 | sec | 15 | sec | 15 | sec |
| Iodine | 6.8/6.8/6.8 | 80/80/80 | μL | 30 | sec | 30 | sec | 30 | sec |

| | | | | | | | | |
|---|---|---|---|---|---|---|---|---|
| Beaucage | 34/51/51 | 80/120/120 | 100 | sec | 200 | sec | 200 | sec |

| | | | | | | |
|---|---|---|---|---|---|---|
| Acetonitrile | NA | 1150/1150/1150 | μL | NA | NA | NA |

Wait time does not include contact time during delivery.
Tandem synthesis utilizes double coupling of linker molecule

[0685] TABLE VI
Lipid Nanoparticle (LNP) Formulations

| Formulation # | Composition | Molar Ratio |
|---|---|---|
| L051 | CLinDMA/DSPC/Chol/PEG-n-DMG | 48/40/10/2 |
| L053 | DMOBA/DSPC/Chol/PEG-n-DMG | 30/20/48/2 |
| L054 | DMOBA/DSPC/Chol/PEG-n-DMG | 50/20/28/2 |
| L069 | CLinDMA/DSPC/Cholesterol/PEG-Cholesterol | 48/40/10/2 |
| L073 | pCLinDMA or CLin DMA/DMOBA/DSPC/Chol/PEG-n-DMG | 25/25/20/28/2 |
| L077 | eCLinDMA/DSPC/Cholesterol/2KPEG-Chol | 48/40/10/2 |
| L080 | eCLinDMA/DSPC/Cholesterol/2KPEG-DMG | 48/40/10/2 |
| L082 | pCLinDMA/DSPC/Cholesterol/2KPEG-DMG | 48/40/10/2 |
| L083 | pCLinDMA/DSPC/Cholesterol/2KPEG-Chol | 48/40/10/2 |
| L086 | CLinDMA/DSPC/Cholesterol/2KPEG-DMG/Linoleyl alcohol | 43/38/10/2/7 |
| L061 | DMLBA/Cholesterol/2KPEG-DMG | 52/45/3 |
| L060 | DMOBA/Cholesterol/2KPEG-DMG N/P ratio of 5 | 52/45/3 |
| L097 | DMLBA/DSPC/Cholesterol/2KPEG-DMG | 50/20/28 |
| L098 | DMOBA/Cholesterol/2KPEG-DMG, N/p ratio of 3 | 52/45/3 |
| L099 | DMOBA/Cholesterol/2KPEG-DMG, N/P ratio of 4 | 52/45/3 |
| L100 | DMOBA/DOBA/3% PEG-DMG, N/P ratio of 3 | 52/45/3 |
| L101 | DMOBA/Cholesterol/2KPEG-Cholesterol | 52/45/3 |
| L102 | DMOBA/Cholesterol/2KPEG-Cholesterol, N/P ratio of 5 | 52/45/3 |
| L103 | DMLBA/Cholesterol/2KPEG-Cholesterol | 52/45/3 |
| L104 | CLinDMA/DSPC/Cholesterol/2KPEG-cholesterol/Linoleyl alcohol | 43/38/10/2/7 |

N/P ratio = Nitrogen:Phosphorous ratio between cationic lipid and nucleic acid

[chemical structure]

[chemical structure]

[chemical structure]

[chemical structure]

[chemical structure]

[chemical structure]

[chemical structure]

[chemical structure]

[chemical structure]

[chemical structure]

[chemical structure]

The application's sequence listing, which the Patent Office published only in electronic form, follows.

SEQUENCE LISTING (2035 sequences)

SEQ ID NO: 1 - RNA, 19 nt, Artificial Sequence
  Description of Artificial Sequence: synthetic
gccccgggaggucucguag

SEQ ID NO: 2 - RNA, 19 nt, Artificial Sequence
  Description of Artificial Sequence: synthetic
ugugguacugccugauagg

SEQ ID NO: 3 - RNA, 19 nt, Artificial Sequence
  Description of Artificial Sequence: synthetic
uugugguacugccugauag

SEQ ID NO: 4 - RNA, 19 nt, Artificial Sequence
  Description of Artificial Sequence: synthetic
ccccgggaggucucguaga

SEQ ID NO: 5 - RNA, 19 nt, Artificial Sequence
  Description of Artificial Sequence: synthetic
gugguacugccugauaggg

SEQ ID NO: 6 - RNA, 19 nt, Artificial Sequence
  Description of Artificial Sequence: synthetic
cugccugauagggugcuug

SEQ ID NO: 7 - RNA, 19 nt, Artificial Sequence
  Description of Artificial Sequence: synthetic
ccuugugguacugccugau

SEQ ID NO: 8 - RNA, 19 nt, Artificial Sequence
  Description of Artificial Sequence: synthetic
gcgaaaggccuugugguac

SEQ ID NO: 9 - RNA, 19 nt, Artificial Sequence
  Description of Artificial Sequence: synthetic
uacugccugauagggugcu

SEQ ID NO: 10 - RNA, 19 nt, Artificial Sequence
  Description of Artificial Sequence: synthetic
gguacugccugauagggug

SEQ ID NO: 11 - RNA, 19 nt, Artificial Sequence
  Description of Artificial Sequence: synthetic
aaaggccuugugguacugc

SEQ ID NO: 12 - RNA, 19 nt, Artificial Sequence
  Description of Artificial Sequence: synthetic
aaggccuugugguacugcc

SEQ ID NO: 13 - RNA, 19 nt, Artificial Sequence
  Description of Artificial Sequence: synthetic
cuugugguacugccugaua

SEQ ID NO: 14 - RNA, 19 nt, Artificial Sequence
  Description of Artificial Sequence: synthetic
aggccuugugguacugccu

SEQ ID NO: 15 - RNA, 19 nt, Artificial Sequence
  Description of Artificial Sequence: synthetic
guacugccugauagggugc

SEQ ID NO: 16 - RNA, 19 nt, Artificial Sequence
  Description of Artificial Sequence: synthetic
acugccugauagggugcuu

SEQ ID NO: 17 - RNA, 19 nt, Artificial Sequence
  Description of Artificial Sequence: synthetic
cuugcgagugccccgggag

SEQ ID NO: 18 - RNA, 19 nt, Artificial Sequence
  Description of Artificial Sequence: synthetic
cugauagggugcuugcgag

SEQ ID NO: 19 - RNA, 19 nt, Artificial Sequence
  Description of Artificial Sequence: synthetic
uugcgagugccccgggagg

SEQ ID NO: 20 - RNA, 19 nt, Artificial Sequence
  Description of Artificial Sequence: synthetic
ccugauagggugcuugcga

SEQ ID NO: 21 - RNA, 19 nt, Artificial Sequence
  Description of Artificial Sequence: synthetic
ggccuugugguacugccug

SEQ ID NO: 22 - RNA, 19 nt, Artificial Sequence
  Description of Artificial Sequence: synthetic
gcuugcgagugccccggga

SEQ ID NO: 23 - RNA, 19 nt, Artificial Sequence
  Description of Artificial Sequence: synthetic
ugccugauagggugcuugc

SEQ ID NO: 24 - RNA, 19 nt, Artificial Sequence
  Description of Artificial Sequence: synthetic
gaaaggccuugugguacug

SEQ ID NO: 25 - RNA, 19 nt, Artificial Sequence
  Description of Artificial Sequence: synthetic
gccugauagggugcuugcg

SEQ ID NO: 26 - RNA, 19 nt, Artificial Sequence
  Description of Artificial Sequence: synthetic
cgaaaggccuugugguacu

SEQ ID NO: 27 - RNA, 19 nt, Artificial Sequence
  Description of Artificial Sequence: synthetic
gccuugugguacugccuga

SEQ ID NO: 28 - RNA, 19 nt, Artificial Sequence
  Description of Artificial Sequence: synthetic
gagugccccgggaggucuc

SEQ ID NO: 29 - RNA, 19 nt, Artificial Sequence
  Description of Artificial Sequence: synthetic
cccgggaggucucguagac

SEQ ID NO: 30 - RNA, 19 nt, Artificial Sequence
  Description of Artificial Sequence: synthetic
ugcgagugccccgggaggu

SEQ ID NO: 31 - RNA, 19 nt, Artificial Sequence
  Description of Artificial Sequence: synthetic
ugguacugccugauagggu

SEQ ID NO: 32 - RNA, 19 nt, Artificial Sequence
  Description of Artificial Sequence: synthetic
ccggugaguacaccggaau

SEQ ID NO: 33 - RNA, 19 nt, Artificial Sequence
  Description of Artificial Sequence: synthetic
gcgagugccccgggagguc

SEQ ID NO: 34 - RNA, 19 nt, Artificial Sequence
  Description of Artificial Sequence: synthetic
cgagugccccgggaggucu

SEQ ID NO: 35 - RNA, 19 nt, Artificial Sequence
  Description of Artificial Sequence: synthetic
ugccccgggaggucucgua

SEQ ID NO: 36 - RNA, 19 nt, Artificial Sequence
  Description of Artificial Sequence: synthetic
gugccccgggaggucucgu

SEQ ID NO: 37 - RNA, 19 nt, Artificial Sequence
  Description of Artificial Sequence: synthetic
agugccccgggaggucucg

SEQ ID NO: 38 - RNA, 19 nt, Artificial Sequence
  Description of Artificial Sequence: synthetic
ccgggaggucucguagacc

SEQ ID NO: 39 - RNA, 19 nt, Artificial Sequence
  Description of Artificial Sequence: synthetic
ugauagggugcuugcgagu

SEQ ID NO: 40 - RNA, 19 nt, Artificial Sequence
  Description of Artificial Sequence: synthetic
gugcuugcgagugccccgg

SEQ ID NO: 41 - RNA, 19 nt, Artificial Sequence
  Description of Artificial Sequence: synthetic
auagggugcuugcgagugc

SEQ ID NO: 42 - RNA, 19 nt, Artificial Sequence
  Description of Artificial Sequence: synthetic
gggugcuugcgagugcccc

SEQ ID NO: 43 - RNA, 19 nt, Artificial Sequence
  Description of Artificial Sequence: synthetic
cgggaggucucguagaccg

SEQ ID NO: 44 - RNA, 19 nt, Artificial Sequence
  Description of Artificial Sequence: synthetic
gggaggucucguagaccgu

SEQ ID NO: 45 - RNA, 19 nt, Artificial Sequence
  Description of Artificial Sequence: synthetic
gauagggugcuugcgagug

SEQ ID NO: 46 - RNA, 19 nt, Artificial Sequence
  Description of Artificial Sequence: synthetic
ggaggucucguagaccgug

SEQ ID NO: 47 - RNA, 19 nt, Artificial Sequence
  Description of Artificial Sequence: synthetic
agggugcuugcgagugccc

SEQ ID NO: 48 - RNA, 19 nt, Artificial Sequence
  Description of Artificial Sequence: synthetic
ugcuugcgagugccccggg

SEQ ID NO: 49 - RNA, 19 nt, Artificial Sequence
  Description of Artificial Sequence: synthetic
ggugcuugcgagugccccg

SEQ ID NO: 50 - RNA, 19 nt, Artificial Sequence
  Description of Artificial Sequence: synthetic
uagggugcuugcgagugcc

SEQ ID NO: 51 - RNA, 19 nt, Artificial Sequence
  Description of Artificial Sequence: synthetic
aggucucguagaccgugca

SEQ ID NO: 52 - RNA, 19 nt, Artificial Sequence
  Description of Artificial Sequence: synthetic
gaggucucguagaccgugc

SEQ ID NO: 53 - RNA, 19 nt, Artificial Sequence
  Description of Artificial Sequence: synthetic
ggaaccggugaguacaccg

SEQ ID NO: 54 - RNA, 19 nt, Artificial Sequence
  Description of Artificial Sequence: synthetic
cggaaccggugaguacacc

SEQ ID NO: 55 - RNA, 19 nt, Artificial Sequence
  Description of Artificial Sequence: synthetic
cggugaguacaccggaauu

SEQ ID NO: 56 - RNA, 19 nt, Artificial Sequence
  Description of Artificial Sequence: synthetic
gcggaaccggugaguacac

SEQ ID NO: 57 - RNA, 19 nt, Artificial Sequence
  Description of Artificial Sequence: synthetic
aaccggugaguacaccgga

SEQ ID NO: 58 - RNA, 19 nt, Artificial Sequence
  Description of Artificial Sequence: synthetic
accggugaguacaccggaa

SEQ ID NO: 59 - RNA, 19 nt, Artificial Sequence
  Description of Artificial Sequence: synthetic
cugcggaaccggugaguac

SEQ ID NO: 60 - RNA, 19 nt, Artificial Sequence
  Description of Artificial Sequence: synthetic
gucugcggaaccggugagu

SEQ ID NO: 61 - RNA, 19 nt, Artificial Sequence
  Description of Artificial Sequence: synthetic
gaaccggugaguacaccgg

SEQ ID NO: 62 - RNA, 19 nt, Artificial Sequence
  Description of Artificial Sequence: synthetic
ugcggaaccggugaguaca

SEQ ID NO: 63 - RNA, 19 nt, Artificial Sequence
  Description of Artificial Sequence: synthetic
ucugcggaaccggugagua

SEQ ID NO: 64 - RNA, 19 nt, Artificial Sequence
  Description of Artificial Sequence: synthetic
gggagagccauaguggucu

SEQ ID NO: 65 - RNA, 19 nt, Artificial Sequence
  Description of Artificial Sequence: synthetic
guggucugcggaaccggug

SEQ ID NO: 66 - RNA, 19 nt, Artificial Sequence
  Description of Artificial Sequence: synthetic
ggucugcggaaccggugag

SEQ ID NO: 67 - RNA, 19 nt, Artificial Sequence
  Description of Artificial Sequence: synthetic
cgggagagccauagugguc

SEQ ID NO: 68 - RNA, 19 nt, Artificial Sequence
  Description of Artificial Sequence: synthetic
ccgggagagccauaguggu

SEQ ID NO: 69 - RNA, 19 nt, Artificial Sequence
  Description of Artificial Sequence: synthetic
uggucugcggaaccgguga

SEQ ID NO: 70 - RNA, 19 nt, Artificial Sequence
  Description of Artificial Sequence: synthetic
gugaguacaccggaauugc

SEQ ID NO: 71 - RNA, 19 nt, Artificial Sequence
  Description of Artificial Sequence: synthetic
ugaguacaccggaauugcc

SEQ ID NO: 72 - RNA, 19 nt, Artificial Sequence
  Description of Artificial Sequence: synthetic
ggugaguacaccggaauug

SEQ ID NO: 73 - RNA, 19 nt, Artificial Sequence
  Description of Artificial Sequence: synthetic
gagccauaguggucugcgg

SEQ ID NO: 74 - RNA, 19 nt, Artificial Sequence
  Description of Artificial Sequence: synthetic
agagccauaguggucugcg

SEQ ID NO: 75 - RNA, 19 nt, Artificial Sequence
  Description of Artificial Sequence: synthetic
uaguggucugcggaaccgg

SEQ ID NO: 76 - RNA, 19 nt, Artificial Sequence
  Description of Artificial Sequence: synthetic
auaguggucugcggaaccg

SEQ ID NO: 77 - RNA, 19 nt, Artificial Sequence
  Description of Artificial Sequence: synthetic
gagagccauaguggucugc

SEQ ID NO: 78 - RNA, 19 nt, Artificial Sequence
  Description of Artificial Sequence: synthetic
gccauaguggucugcggaa

SEQ ID NO: 79 - RNA, 19 nt, Artificial Sequence
  Description of Artificial Sequence: synthetic
aguggucugcggaaccggu

SEQ ID NO: 80 - RNA, 19 nt, Artificial Sequence
  Description of Artificial Sequence: synthetic
cauaguggucugcggaacc

SEQ ID NO: 81 - RNA, 19 nt, Artificial Sequence
  Description of Artificial Sequence: synthetic
agccauaguggucugcgga

SEQ ID NO: 82 - RNA, 19 nt, Artificial Sequence
  Description of Artificial Sequence: synthetic
ccauaguggucugcggaac

SEQ ID NO: 83 - RNA, 19 nt, Artificial Sequence
  Description of Artificial Sequence: synthetic
ccccucccgggagagccau

SEQ ID NO: 84 - RNA, 19 nt, Artificial Sequence
  Description of Artificial Sequence: synthetic
ggagagccauaguggucug

SEQ ID NO: 85 - RNA, 19 nt, Artificial Sequence
  Description of Artificial Sequence: synthetic
cccgggagagccauagugg

SEQ ID NO: 86 - RNA, 19 nt, Artificial Sequence
  Description of Artificial Sequence: synthetic
cccccucccgggagagcca

SEQ ID NO: 87 - RNA, 19 nt, Artificial Sequence
  Description of Artificial Sequence: synthetic
ucccgggagagccauagug

SEQ ID NO: 88 - RNA, 19 nt, Artificial Sequence
  Description of Artificial Sequence: synthetic
ccccccucccgggagagcc

SEQ ID NO: 89 - RNA, 19 nt, Artificial Sequence
  Description of Artificial Sequence: synthetic
cccucccgggagagccaua

SEQ ID NO: 90 - RNA, 19 nt, Artificial Sequence
  Description of Artificial Sequence: synthetic
ccucccgggagagccauag

SEQ ID NO: 91 - RNA, 19 nt, Artificial Sequence
  Description of Artificial Sequence: synthetic
cucccgggagagccauagu

SEQ ID NO: 92 - RNA, 19 nt, Artificial Sequence
  Description of Artificial Sequence: synthetic
uguugccgcgcaggggccc

SEQ ID NO: 93 - RNA, 19 nt, Artificial Sequence
  Description of Artificial Sequence: synthetic
cccccccucccgggagagc

SEQ ID NO: 94 - RNA, 19 nt, Artificial Sequence
  Description of Artificial Sequence: synthetic
cauggcguuaguaugagug

SEQ ID NO: 95 - RNA, 19 nt, Artificial Sequence
  Description of Artificial Sequence: synthetic
uagccauggcguuaguaug

SEQ ID NO: 96 - RNA, 19 nt, Artificial Sequence
  Description of Artificial Sequence: synthetic
agccauggcguuaguauga

SEQ ID NO: 97 - RNA, 19 nt, Artificial Sequence
  Description of Artificial Sequence: synthetic
ccauggcguuaguaugagu

SEQ ID NO: 98 - RNA, 19 nt, Artificial Sequence
  Description of Artificial Sequence: synthetic
auggcguuaguaugagugu

SEQ ID NO: 99 - RNA, 19 nt, Artificial Sequence
  Description of Artificial Sequence: synthetic
aagcgucuagccauggcgu

SEQ ID NO: 100 - RNA, 19 nt, Artificial Sequence
  Description of Artificial Sequence: synthetic
gucuagccauggcguuagu

SEQ ID NO: 101 - RNA, 19 nt, Artificial Sequence
  Description of Artificial Sequence: synthetic
aaagcgucuagccauggcg

SEQ ID NO: 102 - RNA, 19 nt, Artificial Sequence
  Description of Artificial Sequence: synthetic
gcgucuagccauggcguua

SEQ ID NO: 103 - RNA, 19 nt, Artificial Sequence
  Description of Artificial Sequence: synthetic
gccauggcguuaguaugag

SEQ ID NO: 104 - RNA, 19 nt, Artificial Sequence
  Description of Artificial Sequence: synthetic
agcgucuagccauggcguu

SEQ ID NO: 105 - RNA, 19 nt, Artificial Sequence
  Description of Artificial Sequence: synthetic
cgucuagccauggcguuag

SEQ ID NO: 106 - RNA, 19 nt, Artificial Sequence
  Description of Artificial Sequence: synthetic
ucuagccauggcguuagua

SEQ ID NO: 107 - RNA, 19 nt, Artificial Sequence
  Description of Artificial Sequence: synthetic
gaaagcgucuagccauggc

SEQ ID NO: 108 - RNA, 19 nt, Artificial Sequence
  Description of Artificial Sequence: synthetic
cuagccauggcguuaguau

SEQ ID NO: 109 - RNA, 19 nt, Artificial Sequence
  Description of Artificial Sequence: synthetic
cacuccccugugaggaacu

SEQ ID NO: 110 - RNA, 19 nt, Artificial Sequence
  Description of Artificial Sequence: synthetic
accucaaagaaaaaccaaa

SEQ ID NO: 111 - RNA, 19 nt, Artificial Sequence
  Description of Artificial Sequence: synthetic
cgcagaaagcgucuagcca

SEQ ID NO: 112 - RNA, 19 nt, Artificial Sequence
  Description of Artificial Sequence: synthetic
ggguaaggucaucgauacc

SEQ ID NO: 113 - RNA, 19 nt, Artificial Sequence
  Description of Artificial Sequence: synthetic
cagaaagcgucuagccaug

SEQ ID NO: 114 - RNA, 19 nt, Artificial Sequence
  Description of Artificial Sequence: synthetic
aaaccucaaagaaaaacca

SEQ ID NO: 115 - RNA, 19 nt, Artificial Sequence
  Description of Artificial Sequence: synthetic
gcagaaagcgucuagccau

SEQ ID NO: 116 - RNA, 19 nt, Artificial Sequence
  Description of Artificial Sequence: synthetic
agaaagcgucuagccaugg

SEQ ID NO: 117 - RNA, 19 nt, Artificial Sequence
  Description of Artificial Sequence: synthetic
acgcagaaagcgucuagcc

SEQ ID NO: 118 - RNA, 19 nt, Artificial Sequence
  Description of Artificial Sequence: synthetic
aaccucaaagaaaaaccaa

SEQ ID NO: 119 - RNA, 19 nt, Artificial Sequence
  Description of Artificial Sequence: synthetic
uggguaaggucaucgauac

SEQ ID NO: 120 - RNA, 19 nt, Artificial Sequence
  Description of Artificial Sequence: synthetic
guaaggucaucgauacccu

SEQ ID NO: 121 - RNA, 19 nt, Artificial Sequence
  Description of Artificial Sequence: synthetic
uucacgcagaaagcgucua

SEQ ID NO: 122 - RNA, 19 nt, Artificial Sequence
  Description of Artificial Sequence: synthetic
gguaaggucaucgauaccc

SEQ ID NO: 123 - RNA, 19 nt, Artificial Sequence
  Description of Artificial Sequence: synthetic
aucacuccccugugaggaa

SEQ ID NO: 124 - RNA, 19 nt, Artificial Sequence
  Description of Artificial Sequence: synthetic
ucacuccccugugaggaac

SEQ ID NO: 125 - RNA, 19 nt, Artificial Sequence
  Description of Artificial Sequence: synthetic
ugucuucacgcagaaagcg

SEQ ID NO: 126 - RNA, 19 nt, Artificial Sequence
  Description of Artificial Sequence: synthetic
ucacgcagaaagcgucuag

SEQ ID NO: 127 - RNA, 19 nt, Artificial Sequence
  Description of Artificial Sequence: synthetic
cacgcagaaagcgucuagc

SEQ ID NO: 128 - RNA, 19 nt, Artificial Sequence
  Description of Artificial Sequence: synthetic
gaccggguccuuucuugga

SEQ ID NO: 129 - RNA, 19 nt, Artificial Sequence
  Description of Artificial Sequence: synthetic
gaggaacuacugucuucac

SEQ ID NO: 130 - RNA, 19 nt, Artificial Sequence
  Description of Artificial Sequence: synthetic
cugugaggaacuacugucu

SEQ ID NO: 131 - RNA, 19 nt, Artificial Sequence
  Description of Artificial Sequence: synthetic
ggaacuacugucuucacgc

SEQ ID NO: 132 - RNA, 19 nt, Artificial Sequence
  Description of Artificial Sequence: synthetic
acuccccugugaggaacua

SEQ ID NO: 133 - RNA, 19 nt, Artificial Sequence
  Description of Artificial Sequence: synthetic
gucuucacgcagaaagcgu

SEQ ID NO: 134 - RNA, 19 nt, Artificial Sequence
  Description of Artificial Sequence: synthetic
aggaacuacugucuucacg

SEQ ID NO: 135 - RNA, 19 nt, Artificial Sequence
  Description of Artificial Sequence: synthetic
ccugugaggaacuacuguc

SEQ ID NO: 136 - RNA, 19 nt, Artificial Sequence
  Description of Artificial Sequence: synthetic
ugugaggaacuacugucuu

SEQ ID NO: 137 - RNA, 19 nt, Artificial Sequence
  Description of Artificial Sequence: synthetic
ucuucacgcagaaagcguc

SEQ ID NO: 138 - RNA, 19 nt, Artificial Sequence
  Description of Artificial Sequence: synthetic
gaacuacugucuucacgca

SEQ ID NO: 139 - RNA, 19 nt, Artificial Sequence
  Description of Artificial Sequence: synthetic
cccugugaggaacuacugu

SEQ ID NO: 140 - RNA, 19 nt, Artificial Sequence
  Description of Artificial Sequence: synthetic
cuucacgcagaaagcgucu

SEQ ID NO: 141 - RNA, 19 nt, Artificial Sequence
  Description of Artificial Sequence: synthetic
ugaggaacuacugucuuca

SEQ ID NO: 142 - RNA, 19 nt, Artificial Sequence
  Description of Artificial Sequence: synthetic
uggcguuaguaugaguguc

SEQ ID NO: 143 - RNA, 19 nt, Artificial Sequence
  Description of Artificial Sequence: synthetic
ccccugugaggaacuacug

SEQ ID NO: 144 - RNA, 19 nt, Artificial Sequence
  Description of Artificial Sequence: synthetic
gugaggaacuacugucuuc

SEQ ID NO: 145 - RNA, 19 nt, Artificial Sequence
  Description of Artificial Sequence: synthetic
ggcguuaguaugagugucg

SEQ ID NO: 146 - RNA, 19 nt, Artificial Sequence
  Description of Artificial Sequence: synthetic
gccgaguaguguugggucg

SEQ ID NO: 147 - RNA, 19 nt, Artificial Sequence
  Description of Artificial Sequence: synthetic
acugucuucacgcagaaag

SEQ ID NO: 148 - RNA, 19 nt, Artificial Sequence
  Description of Artificial Sequence: synthetic
ugggucgcgaaaggccuug

SEQ ID NO: 149 - RNA, 19 nt, Artificial Sequence
  Description of Artificial Sequence: synthetic
cuacugucuucacgcagaa

SEQ ID NO: 150 - RNA, 19 nt, Artificial Sequence
  Description of Artificial Sequence: synthetic
cgaguaguguugggucgcg

SEQ ID NO: 151 - RNA, 19 nt, Artificial Sequence
  Description of Artificial Sequence: synthetic
guaguguugggucgcgaaa

SEQ ID NO: 152 - RNA, 19 nt, Artificial Sequence
  Description of Artificial Sequence: synthetic
uaaaccucaaagaaaaacc

SEQ ID NO: 153 - RNA, 19 nt, Artificial Sequence
  Description of Artificial Sequence: synthetic
ccgaguaguguugggucgc

SEQ ID NO: 154 - RNA, 19 nt, Artificial Sequence
  Description of Artificial Sequence: synthetic
agccgaguaguguuggguc

SEQ ID NO: 155 - RNA, 19 nt, Artificial Sequence
  Description of Artificial Sequence: synthetic
gucgcgaaaggccuugugg

SEQ ID NO: 156 - RNA, 19 nt, Artificial Sequence
  Description of Artificial Sequence: synthetic
uaguguugggucgcgaaag

SEQ ID NO: 157 - RNA, 19 nt, Artificial Sequence
  Description of Artificial Sequence: synthetic
cuagccgaguaguguuggg

SEQ ID NO: 158 - RNA, 19 nt, Artificial Sequence
  Description of Artificial Sequence: synthetic
gaguaguguugggucgcga

SEQ ID NO: 159 - RNA, 19 nt, Artificial Sequence
  Description of Artificial Sequence: synthetic
ucgcgaaaggccuuguggu

SEQ ID NO: 160 - RNA, 19 nt, Artificial Sequence
  Description of Artificial Sequence: synthetic
gcguuaguaugagugucgu

SEQ ID NO: 161 - RNA, 19 nt, Artificial Sequence
  Description of Artificial Sequence: synthetic
uagccgaguaguguugggu

SEQ ID NO: 162 - RNA, 19 nt, Artificial Sequence
  Description of Artificial Sequence: synthetic
aacuacugucuucacgcag

SEQ ID NO: 163 - RNA, 19 nt, Artificial Sequence
  Description of Artificial Sequence: synthetic
cgcgaaaggccuuguggua

SEQ ID NO: 164 - RNA, 19 nt, Artificial Sequence
  Description of Artificial Sequence: synthetic
aguguugggucgcgaaagg

SEQ ID NO: 165 - RNA, 19 nt, Artificial Sequence
  Description of Artificial Sequence: synthetic
guugggucgcgaaaggccu

SEQ ID NO: 166 - RNA, 19 nt, Artificial Sequence
  Description of Artificial Sequence: synthetic
aguaguguugggucgcgaa

SEQ ID NO: 167 - RNA, 19 nt, Artificial Sequence
  Description of Artificial Sequence: synthetic
uugggucgcgaaaggccuu

SEQ ID NO: 168 - RNA, 19 nt, Artificial Sequence
  Description of Artificial Sequence: synthetic
uccccugugaggaacuacu

SEQ ID NO: 169 - RNA, 19 nt, Artificial Sequence
  Description of Artificial Sequence: synthetic
uacugucuucacgcagaaa

SEQ ID NO: 170 - RNA, 19 nt, Artificial Sequence
  Description of Artificial Sequence: synthetic
guguugggucgcgaaaggc

SEQ ID NO: 171 - RNA, 19 nt, Artificial Sequence
  Description of Artificial Sequence: synthetic
acuacugucuucacgcaga

SEQ ID NO: 172 - RNA, 19 nt, Artificial Sequence
  Description of Artificial Sequence: synthetic
cugucuucacgcagaaagc

SEQ ID NO: 173 - RNA, 19 nt, Artificial Sequence
  Description of Artificial Sequence: synthetic
gggucgcgaaaggccuugu

SEQ ID NO: 174 - RNA, 19 nt, Artificial Sequence
  Description of Artificial Sequence: synthetic
ccuaaaccucaaagaaaaa

SEQ ID NO: 175 - RNA, 19 nt, Artificial Sequence
  Description of Artificial Sequence: synthetic
ggucgcgaaaggccuugug

SEQ ID NO: 176 - RNA, 19 nt, Artificial Sequence
  Description of Artificial Sequence: synthetic
cuaaaccucaaagaaaaac

SEQ ID NO: 177 - RNA, 19 nt, Artificial Sequence
  Description of Artificial Sequence: synthetic
uguugggucgcgaaaggcc

SEQ ID NO: 178 - RNA, 19 nt, Artificial Sequence
  Description of Artificial Sequence: synthetic
cuccccugugaggaacuac

SEQ ID NO: 179 - RNA, 19 nt, Artificial Sequence
  Description of Artificial Sequence: synthetic
uccuaaaccucaaagaaaa

SEQ ID NO: 180 - RNA, 19 nt, Artificial Sequence
  Description of Artificial Sequence: synthetic
accggguccuuucuuggau

SEQ ID NO: 181 - RNA, 19 nt, Artificial Sequence
  Description of Artificial Sequence: synthetic
aauccuaaaccucaaagaa

SEQ ID NO: 182 - RNA, 19 nt, Artificial Sequence
  Description of Artificial Sequence: synthetic
ucaaugccuggagauuugg

SEQ ID NO: 183 - RNA, 19 nt, Artificial Sequence
  Description of Artificial Sequence: synthetic
augccuggagauuugggcg

SEQ ID NO: 184 - RNA, 19 nt, Artificial Sequence
  Description of Artificial Sequence: synthetic
aaugccuggagauuugggc

SEQ ID NO: 185 - RNA, 19 nt, Artificial Sequence
  Description of Artificial Sequence: synthetic
ccgaccucaugggguacau

SEQ ID NO: 186 - RNA, 19 nt, Artificial Sequence
  Description of Artificial Sequence: synthetic
gcucaaugccuggagauuu

SEQ ID NO: 187 - RNA, 19 nt, Artificial Sequence
  Description of Artificial Sequence: synthetic
cucaaugccuggagauuug

SEQ ID NO: 188 - RNA, 19 nt, Artificial Sequence
  Description of Artificial Sequence: synthetic
gcuagccgaguaguguugg

SEQ ID NO: 189 - RNA, 19 nt, Artificial Sequence
  Description of Artificial Sequence: synthetic
cgcucaaugccuggagauu

SEQ ID NO: 190 - RNA, 19 nt, Artificial Sequence
  Description of Artificial Sequence: synthetic
caaugccuggagauuuggg

SEQ ID NO: 191 - RNA, 19 nt, Artificial Sequence
  Description of Artificial Sequence: synthetic
gccgaccucaugggguaca

SEQ ID NO: 192 - RNA, 19 nt, Artificial Sequence
  Description of Artificial Sequence: synthetic
auccuaaaccucaaagaaa

SEQ ID NO: 193 - RNA, 19 nt, Artificial Sequence
  Description of Artificial Sequence: synthetic
agauuugggcgugcccccg

SEQ ID NO: 194 - RNA, 19 nt, Artificial Sequence
  Description of Artificial Sequence: synthetic
cccgcucaaugccuggaga

SEQ ID NO: 195 - RNA, 19 nt, Artificial Sequence
  Description of Artificial Sequence: synthetic
gagauuugggcgugccccc

SEQ ID NO: 196 - RNA, 19 nt, Artificial Sequence
  Description of Artificial Sequence: synthetic
ggagauuugggcgugcccc

SEQ ID NO: 197 - RNA, 19 nt, Artificial Sequence
  Description of Artificial Sequence: synthetic
gauuugggcgugcccccgc

SEQ ID NO: 198 - RNA, 19 nt, Artificial Sequence
  Description of Artificial Sequence: synthetic
ccgcucaaugccuggagau

SEQ ID NO: 199 - RNA, 19 nt, Artificial Sequence
  Description of Artificial Sequence: synthetic
aguacaccggaauugccag

SEQ ID NO: 200 - RNA, 19 nt, Artificial Sequence
  Description of Artificial Sequence: synthetic
uacaccggaauugccagga

SEQ ID NO: 201 - RNA, 19 nt, Artificial Sequence
  Description of Artificial Sequence: synthetic
gaguacaccggaauugcca

SEQ ID NO: 202 - RNA, 19 nt, Artificial Sequence
  Description of Artificial Sequence: synthetic
guacaccggaauugccagg

SEQ ID NO: 203 - RNA, 19 nt, Artificial Sequence
  Description of Artificial Sequence: synthetic
uugccgcgcaggggcccca

SEQ ID NO: 204 - RNA, 19 nt, Artificial Sequence
  Description of Artificial Sequence: synthetic
cuggagauuugggcgugcc

SEQ ID NO: 205 - RNA, 19 nt, Artificial Sequence
  Description of Artificial Sequence: synthetic
guugccgcgcaggggcccc

SEQ ID NO: 206 - RNA, 19 nt, Artificial Sequence
  Description of Artificial Sequence: synthetic
gccuggagauuugggcgug

SEQ ID NO: 207 - RNA, 19 nt, Artificial Sequence
  Description of Artificial Sequence: synthetic
uggagauuugggcgugccc

SEQ ID NO: 208 - RNA, 19 nt, Artificial Sequence
  Description of Artificial Sequence: synthetic
ccuggagauuugggcgugc

SEQ ID NO: 209 - RNA, 19 nt, Artificial Sequence
  Description of Artificial Sequence: synthetic
ugcuagccgaguaguguug

SEQ ID NO: 210 - RNA, 19 nt, Artificial Sequence
  Description of Artificial Sequence: synthetic
ugccuggagauuugggcgu

SEQ ID NO: 211 - RNA, 19 nt, Artificial Sequence
  Description of Artificial Sequence: synthetic
cugcuagccgaguaguguu

SEQ ID NO: 212 - RNA, 19 nt, Artificial Sequence
  Description of Artificial Sequence: synthetic
acugcuagccgaguagugu

SEQ ID NO: 213 - RNA, 19 nt, Artificial Sequence
  Description of Artificial Sequence: synthetic
gacugcuagccgaguagug

SEQ ID NO: 214 - RNA, 19 nt, Artificial Sequence
  Description of Artificial Sequence: synthetic
agacugcuagccgaguagu

SEQ ID NO: 215 - RNA, 19 nt, Artificial Sequence
  Description of Artificial Sequence: synthetic
acccgcucaaugccuggag

SEQ ID NO: 216 - RNA, 19 nt, Artificial Sequence
  Description of Artificial Sequence: synthetic
aacccgcucaaugccugga

SEQ ID NO: 217 - RNA, 19 nt, Artificial Sequence
  Description of Artificial Sequence: synthetic
ugccgcgcaggggccccag

SEQ ID NO: 218 - RNA, 19 nt, Artificial Sequence
  Description of Artificial Sequence: synthetic
aggggccccagguugggug

SEQ ID NO: 219 - RNA, 19 nt, Artificial Sequence
  Description of Artificial Sequence: synthetic
gggccccagguugggugug

SEQ ID NO: 220 - RNA, 19 nt, Artificial Sequence
  Description of Artificial Sequence: synthetic
caggggccccagguugggu

SEQ ID NO: 221 - RNA, 19 nt, Artificial Sequence
  Description of Artificial Sequence: synthetic
ggccccagguugggugugc

SEQ ID NO: 222 - RNA, 19 nt, Artificial Sequence
  Description of Artificial Sequence: synthetic
cgcaggggccccagguugg

SEQ ID NO: 223 - RNA, 19 nt, Artificial Sequence
  Description of Artificial Sequence: synthetic
ugggcaggauggcuccugu

SEQ ID NO: 224 - RNA, 19 nt, Artificial Sequence
  Description of Artificial Sequence: synthetic
gccccagguugggugugcg

SEQ ID NO: 225 - RNA, 19 nt, Artificial Sequence
  Description of Artificial Sequence: synthetic
gcaggggccccagguuggg

SEQ ID NO: 226 - RNA, 19 nt, Artificial Sequence
  Description of Artificial Sequence: synthetic
gggcaggauggcuccuguc

SEQ ID NO: 227 - RNA, 19 nt, Artificial Sequence
  Description of Artificial Sequence: synthetic
ggggccccagguugggugu

SEQ ID NO: 228 - RNA, 19 nt, Artificial Sequence
  Description of Artificial Sequence: synthetic
gccgcgcaggggccccagg

SEQ ID NO: 229 - RNA, 19 nt, Artificial Sequence
  Description of Artificial Sequence: synthetic
gcgcaggggccccagguug

SEQ ID NO: 230 - RNA, 19 nt, Artificial Sequence
  Description of Artificial Sequence: synthetic
cgcgcaggggccccagguu

SEQ ID NO: 231 - RNA, 19 nt, Artificial Sequence
  Description of Artificial Sequence: synthetic
ccgcgcaggggccccaggu

SEQ ID NO: 232 - RNA, 19 nt, Artificial Sequence
  Description of Artificial Sequence: synthetic
aggacgaccggguccuuuc

SEQ ID NO: 233 - RNA, 19 nt, Artificial Sequence
  Description of Artificial Sequence: synthetic
caggacgaccggguccuuu

SEQ ID NO: 234 - RNA, 19 nt, Artificial Sequence
  Description of Artificial Sequence: synthetic
ugccaggacgaccgggucc

SEQ ID NO: 235 - RNA, 19 nt, Artificial Sequence
  Description of Artificial Sequence: synthetic
auugccaggacgaccgggu

SEQ ID NO: 236 - RNA, 19 nt, Artificial Sequence
  Description of Artificial Sequence: synthetic
aauugccaggacgaccggg

SEQ ID NO: 237 - RNA, 19 nt, Artificial Sequence
  Description of Artificial Sequence: synthetic
uugccaggacgaccggguc

SEQ ID NO: 238 - RNA, 19 nt, Artificial Sequence
  Description of Artificial Sequence: synthetic
ccaggacgaccggguccuu

SEQ ID NO: 239 - RNA, 19 nt, Artificial Sequence
  Description of Artificial Sequence: synthetic
gccaggacgaccggguccu

SEQ ID NO: 240 - RNA, 19 nt, Artificial Sequence
  Description of Artificial Sequence: synthetic
gaauugccaggacgaccgg

SEQ ID NO: 241 - RNA, 19 nt, Artificial Sequence
  Description of Artificial Sequence: synthetic
acgaccggguccuuucuug

SEQ ID NO: 242 - RNA, 19 nt, Artificial Sequence
  Description of Artificial Sequence: synthetic
gacgaccggguccuuucuu

SEQ ID NO: 243 - RNA, 19 nt, Artificial Sequence
  Description of Artificial Sequence: synthetic
cgaccggguccuuucuugg

SEQ ID NO: 244 - RNA, 19 nt, Artificial Sequence
  Description of Artificial Sequence: synthetic
ggacgaccggguccuuucu

SEQ ID NO: 245 - RNA, 19 nt, Artificial Sequence
  Description of Artificial Sequence: synthetic
ccggaauugccaggacgac

SEQ ID NO: 246 - RNA, 19 nt, Artificial Sequence
  Description of Artificial Sequence: synthetic
acaccggaauugccaggac

SEQ ID NO: 247 - RNA, 19 nt, Artificial Sequence
  Description of Artificial Sequence: synthetic
accggaauugccaggacga

SEQ ID NO: 248 - RNA, 19 nt, Artificial Sequence
  Description of Artificial Sequence: synthetic
cggaauugccaggacgacc

SEQ ID NO: 249 - RNA, 19 nt, Artificial Sequence
  Description of Artificial Sequence: synthetic
ggaauugccaggacgaccg

SEQ ID NO: 250 - RNA, 19 nt, Artificial Sequence
  Description of Artificial Sequence: synthetic
caccggaauugccaggacg

SEQ ID NO: 251 - RNA, 19 nt, Artificial Sequence
  Description of Artificial Sequence: synthetic
ccccagguugggugugcgc

SEQ ID NO: 252 - RNA, 19 nt, Artificial Sequence
  Description of Artificial Sequence: synthetic
gaucguugguggaguuuac

SEQ ID NO: 253 - RNA, 19 nt, Artificial Sequence
  Description of Artificial Sequence: synthetic
cagaucguugguggaguuu

SEQ ID NO: 254 - RNA, 19 nt, Artificial Sequence
  Description of Artificial Sequence: synthetic
agaucguugguggaguuua

SEQ ID NO: 255 - RNA, 19 nt, Artificial Sequence
  Description of Artificial Sequence: synthetic
cccagguugggugugcgcg

SEQ ID NO: 256 - RNA, 19 nt, Artificial Sequence
  Description of Artificial Sequence: synthetic
ccagguugggugugcgcgc

SEQ ID NO: 257 - RNA, 19 nt, Artificial Sequence
  Description of Artificial Sequence: synthetic
agguugggugugcgcgcga

SEQ ID NO: 258 - RNA, 19 nt, Artificial Sequence
  Description of Artificial Sequence: synthetic
cagguugggugugcgcgcg

SEQ ID NO: 259 - RNA, 19 nt, Artificial Sequence
  Description of Artificial Sequence: synthetic
gguugggugugcgcgcgac

SEQ ID NO: 260 - RNA, 19 nt, Artificial Sequence
  Description of Artificial Sequence: synthetic
gaaaaaccaaacguaacac

SEQ ID NO: 261 - RNA, 19 nt, Artificial Sequence
  Description of Artificial Sequence: synthetic
agaaaaaccaaacguaaca

SEQ ID NO: 262 - RNA, 19 nt, Artificial Sequence
  Description of Artificial Sequence: synthetic
aaccaaacguaacaccaac

SEQ ID NO: 263 - RNA, 19 nt, Artificial Sequence
  Description of Artificial Sequence: synthetic
aaagaaaaaccaaacguaa

SEQ ID NO: 264 - RNA, 19 nt, Artificial Sequence
  Description of Artificial Sequence: synthetic
aaaaaccaaacguaacacc

SEQ ID NO: 265 - RNA, 19 nt, Artificial Sequence
  Description of Artificial Sequence: synthetic
aagaaaaaccaaacguaac

SEQ ID NO: 266 - RNA, 19 nt, Artificial Sequence
  Description of Artificial Sequence: synthetic
caaagaaaaaccaaacgua

SEQ ID NO: 267 - RNA, 19 nt, Artificial Sequence
  Description of Artificial Sequence: synthetic
acccccggcguaggucgcg

SEQ ID NO: 268 - RNA, 19 nt, Artificial Sequence
  Description of Artificial Sequence: synthetic
gacccccggcguaggucgc

SEQ ID NO: 269 - RNA, 19 nt, Artificial Sequence
  Description of Artificial Sequence: synthetic
cguuaguaugagugucgug

SEQ ID NO: 270 - RNA, 19 nt, Artificial Sequence
  Description of Artificial Sequence: synthetic
guuaguaugagugucgugc

SEQ ID NO: 271 - RNA, 19 nt, Artificial Sequence
  Description of Artificial Sequence: synthetic
uuaguaugagugucgugca

SEQ ID NO: 272 - RNA, 19 nt, Artificial Sequence
  Description of Artificial Sequence: synthetic
ccaaacguaacaccaaccg

SEQ ID NO: 273 - RNA, 19 nt, Artificial Sequence
  Description of Artificial Sequence: synthetic
accaaacguaacaccaacc

SEQ ID NO: 274 - RNA, 19 nt, Artificial Sequence
  Description of Artificial Sequence: synthetic
uugggcgugcccccgcgag

SEQ ID NO: 275 - RNA, 19 nt, Artificial Sequence
  Description of Artificial Sequence: synthetic
auuugggcgugcccccgcg

SEQ ID NO: 276 - RNA, 19 nt, Artificial Sequence
  Description of Artificial Sequence: synthetic
uuugggcgugcccccgcga

SEQ ID NO: 277 - RNA, 19 nt, Artificial Sequence
  Description of Artificial Sequence: synthetic
aaaccaaacguaacaccaa

SEQ ID NO: 278 - RNA, 19 nt, Artificial Sequence
  Description of Artificial Sequence: synthetic
ugggcgugcccccgcgaga

SEQ ID NO: 279 - RNA, 19 nt, Artificial Sequence
  Description of Artificial Sequence: synthetic
gucagaucguugguggagu

SEQ ID NO: 280 - RNA, 19 nt, Artificial Sequence
  Description of Artificial Sequence: synthetic
gugucgugcagccuccagg

SEQ ID NO: 281 - RNA, 19 nt, Artificial Sequence
  Description of Artificial Sequence: synthetic
ggucagaucguugguggag

SEQ ID NO: 282 - RNA, 19 nt, Artificial Sequence
  Description of Artificial Sequence: synthetic
agugucgugcagccuccag

SEQ ID NO: 283 - RNA, 19 nt, Artificial Sequence
  Description of Artificial Sequence: synthetic
gagugucgugcagccucca

SEQ ID NO: 284 - RNA, 19 nt, Artificial Sequence
  Description of Artificial Sequence: synthetic
ucguagaccgugcaccaug

SEQ ID NO: 285 - RNA, 19 nt, Artificial Sequence
  Description of Artificial Sequence: synthetic
gaccgugcaccaugagcac

SEQ ID NO: 286 - RNA, 19 nt, Artificial Sequence
  Description of Artificial Sequence: synthetic
aguaugagugucgugcagc

SEQ ID NO: 287 - RNA, 19 nt, Artificial Sequence
  Description of Artificial Sequence: synthetic
uaguaugagugucgugcag

SEQ ID NO: 288 - RNA, 19 nt, Artificial Sequence
  Description of Artificial Sequence: synthetic
ucagaucguugguggaguu

SEQ ID NO: 289 - RNA, 19 nt, Artificial Sequence
  Description of Artificial Sequence: synthetic
agaccgugcaccaugagca

SEQ ID NO: 290 - RNA, 19 nt, Artificial Sequence
  Description of Artificial Sequence: synthetic
aaaaccaaacguaacacca

SEQ ID NO: 291 - RNA, 19 nt, Artificial Sequence
  Description of Artificial Sequence: synthetic
guagaccgugcaccaugag

SEQ ID NO: 292 - RNA, 19 nt, Artificial Sequence
  Description of Artificial Sequence: synthetic
cucguagaccgugcaccau

SEQ ID NO: 293 - RNA, 19 nt, Artificial Sequence
  Description of Artificial Sequence: synthetic
cguagaccgugcaccauga

SEQ ID NO: 294 - RNA, 19 nt, Artificial Sequence
  Description of Artificial Sequence: synthetic
ccugggcucagcccgggua

SEQ ID NO: 295 - RNA, 19 nt, Artificial Sequence
  Description of Artificial Sequence: synthetic
uagaccgugcaccaugagc

SEQ ID NO: 296 - RNA, 19 nt, Artificial Sequence
  Description of Artificial Sequence: synthetic
ggucucguagaccgugcac

SEQ ID NO: 297 - RNA, 19 nt, Artificial Sequence
  Description of Artificial Sequence: synthetic
ucucguagaccgugcacca

SEQ ID NO: 298 - RNA, 19 nt, Artificial Sequence
  Description of Artificial Sequence: synthetic
gucucguagaccgugcacc

SEQ ID NO: 299 - RNA, 19 nt, Artificial Sequence
  Description of Artificial Sequence: synthetic
uuggguaaggucaucgaua

SEQ ID NO: 300 - RNA, 19 nt, Artificial Sequence
  Description of Artificial Sequence: synthetic
ucgccgaccucauggggua

SEQ ID NO: 301 - RNA, 19 nt, Artificial Sequence
  Description of Artificial Sequence: synthetic
ccucaaagaaaaaccaaac

SEQ ID NO: 302 - RNA, 19 nt, Artificial Sequence
  Description of Artificial Sequence: synthetic
gggcgugcccccgcgagac

SEQ ID NO: 303 - RNA, 19 nt, Artificial Sequence
  Description of Artificial Sequence: synthetic
ggaugaaccggcugauagc

SEQ ID NO: 304 - RNA, 19 nt, Artificial Sequence
  Description of Artificial Sequence: synthetic
uggaugaaccggcugauag

SEQ ID NO: 305 - RNA, 19 nt, Artificial Sequence
  Description of Artificial Sequence: synthetic
cucaaagaaaaaccaaacg

SEQ ID NO: 306 - RNA, 19 nt, Artificial Sequence
  Description of Artificial Sequence: synthetic
aggaagacuuccgagcggu

SEQ ID NO: 307 - RNA, 19 nt, Artificial Sequence
  Description of Artificial Sequence: synthetic
ucaaagaaaaaccaaacgu

SEQ ID NO: 308 - RNA, 19 nt, Artificial Sequence
  Description of Artificial Sequence: synthetic
ggaagacuuccgagcgguc

SEQ ID NO: 309 - RNA, 19 nt, Artificial Sequence
  Description of Artificial Sequence: synthetic
cgccgaccucaugggguac

SEQ ID NO: 310 - RNA, 19 nt, Artificial Sequence
  Description of Artificial Sequence: synthetic
cuuccgagcggucgcaacc

SEQ ID NO: 311 - RNA, 19 nt, Artificial Sequence
  Description of Artificial Sequence: synthetic
ggcgugcccccgcgagacu

SEQ ID NO: 312 - RNA, 19 nt, Artificial Sequence
  Description of Artificial Sequence: synthetic
uaugagugucgugcagccu

SEQ ID NO: 313 - RNA, 19 nt, Artificial Sequence
  Description of Artificial Sequence: synthetic
ugcccccgcgagacugcua

SEQ ID NO: 314 - RNA, 19 nt, Artificial Sequence
  Description of Artificial Sequence: synthetic
cgagacugcuagccgagua

SEQ ID NO: 315 - RNA, 19 nt, Artificial Sequence
  Description of Artificial Sequence: synthetic
ugagugucgugcagccucc

SEQ ID NO: 316 - RNA, 19 nt, Artificial Sequence
  Description of Artificial Sequence: synthetic
gcccccgcgagacugcuag

SEQ ID NO: 317 - RNA, 19 nt, Artificial Sequence
  Description of Artificial Sequence: synthetic
gagacugcuagccgaguag

SEQ ID NO: 318 - RNA, 19 nt, Artificial Sequence
  Description of Artificial Sequence: synthetic
cccccgcgagacugcuagc

SEQ ID NO: 319 - RNA, 19 nt, Artificial Sequence
  Description of Artificial Sequence: synthetic
cgcgagacugcuagccgag

SEQ ID NO: 320 - RNA, 19 nt, Artificial Sequence
  Description of Artificial Sequence: synthetic
guaugagugucgugcagcc

SEQ ID NO: 321 - RNA, 19 nt, Artificial Sequence
  Description of Artificial Sequence: synthetic
augagugucgugcagccuc

SEQ ID NO: 322 - RNA, 19 nt, Artificial Sequence
  Description of Artificial Sequence: synthetic
gcgagacugcuagccgagu

SEQ ID NO: 323 - RNA, 19 nt, Artificial Sequence
  Description of Artificial Sequence: synthetic
ccccgcgagacugcuagcc

SEQ ID NO: 324 - RNA, 19 nt, Artificial Sequence
  Description of Artificial Sequence: synthetic
ccgcgagacugcuagccga

SEQ ID NO: 325 - RNA, 19 nt, Artificial Sequence
  Description of Artificial Sequence: synthetic
cccgcgagacugcuagccg

SEQ ID NO: 326 - RNA, 19 nt, Artificial Sequence
  Description of Artificial Sequence: synthetic
gcgugcccccgcgagacug

SEQ ID NO: 327 - RNA, 19 nt, Artificial Sequence
  Description of Artificial Sequence: synthetic
gacccccccucccgggaga

SEQ ID NO: 328 - RNA, 19 nt, Artificial Sequence
  Description of Artificial Sequence: synthetic
cggguccuuucuuggauca

SEQ ID NO: 329 - RNA, 19 nt, Artificial Sequence
  Description of Artificial Sequence: synthetic
gugcccccgcgagacugcu

SEQ ID NO: 330 - RNA, 19 nt, Artificial Sequence
  Description of Artificial Sequence: synthetic
cgugcccccgcgagacugc

SEQ ID NO: 331 - RNA, 19 nt, Artificial Sequence
  Description of Artificial Sequence: synthetic
uucgccgaccucauggggu

SEQ ID NO: 332 - RNA, 19 nt, Artificial Sequence
  Description of Artificial Sequence: synthetic
cgcccacaggacgucaagu

SEQ ID NO: 333 - RNA, 19 nt, Artificial Sequence
  Description of Artificial Sequence: synthetic
gcccacaggacgucaaguu

SEQ ID NO: 334 - RNA, 19 nt, Artificial Sequence
  Description of Artificial Sequence: synthetic
acccccccucccgggagag

SEQ ID NO: 335 - RNA, 19 nt, Artificial Sequence
  Description of Artificial Sequence: synthetic
ggacccccccucccgggag

SEQ ID NO: 336 - RNA, 19 nt, Artificial Sequence
  Description of Artificial Sequence: synthetic
ccggguccuuucuuggauc

SEQ ID NO: 337 - RNA, 19 nt, Artificial Sequence
  Description of Artificial Sequence: synthetic
caggacccccccucccggg

SEQ ID NO: 338 - RNA, 19 nt, Artificial Sequence
  Description of Artificial Sequence: synthetic
aggacgucaaguucccggg

SEQ ID NO: 339 - RNA, 19 nt, Artificial Sequence
  Description of Artificial Sequence: synthetic
aggacccccccucccggga

SEQ ID NO: 340 - RNA, 19 nt, Artificial Sequence
  Description of Artificial Sequence: synthetic
ccacaggacgucaaguucc

SEQ ID NO: 341 - RNA, 19 nt, Artificial Sequence
  Description of Artificial Sequence: synthetic
caggacgucaaguucccgg

SEQ ID NO: 342 - RNA, 19 nt, Artificial Sequence
  Description of Artificial Sequence: synthetic
acaggacgucaaguucccg

SEQ ID NO: 343 - RNA, 19 nt, Artificial Sequence
  Description of Artificial Sequence: synthetic
cacaggacgucaaguuccc

SEQ ID NO: 344 - RNA, 19 nt, Artificial Sequence
  Description of Artificial Sequence: synthetic
caguggaugaaccggcuga

SEQ ID NO: 345 - RNA, 19 nt, Artificial Sequence
  Description of Artificial Sequence: synthetic
gggcucagcccggguaccc

SEQ ID NO: 346 - RNA, 19 nt, Artificial Sequence
  Description of Artificial Sequence: synthetic
ccgagcggucgcaaccucg

SEQ ID NO: 347 - RNA, 19 nt, Artificial Sequence
  Description of Artificial Sequence: synthetic
cugggcucagcccggguac

SEQ ID NO: 348 - RNA, 19 nt, Artificial Sequence
  Description of Artificial Sequence: synthetic
aguggaugaaccggcugau

SEQ ID NO: 349 - RNA, 19 nt, Artificial Sequence
  Description of Artificial Sequence: synthetic
uccgagcggucgcaaccuc

SEQ ID NO: 350 - RNA, 19 nt, Artificial Sequence
  Description of Artificial Sequence: synthetic
ugggcucagcccggguacc

SEQ ID NO: 351 - RNA, 19 nt, Artificial Sequence
  Description of Artificial Sequence: synthetic
gguacccuuggccccucua

SEQ ID NO: 352 - RNA, 19 nt, Artificial Sequence
  Description of Artificial Sequence: synthetic
uuccgagcggucgcaaccu

SEQ ID NO: 353 - RNA, 19 nt, Artificial Sequence
  Description of Artificial Sequence: synthetic
ggguacccuuggccccucu

SEQ ID NO: 354 - RNA, 19 nt, Artificial Sequence
  Description of Artificial Sequence: synthetic
ggguccuuucuuggaucaa

SEQ ID NO: 355 - RNA, 19 nt, Artificial Sequence
  Description of Artificial Sequence: synthetic
cccacaggacgucaaguuc

SEQ ID NO: 356 - RNA, 19 nt, Artificial Sequence
  Description of Artificial Sequence: synthetic
gguugcucuuucucuaucu

SEQ ID NO: 357 - RNA, 19 nt, Artificial Sequence
  Description of Artificial Sequence: synthetic
gugggcaggauggcuccug

SEQ ID NO: 358 - RNA, 19 nt, Artificial Sequence
  Description of Artificial Sequence: synthetic
ggugggcaggauggcuccu

SEQ ID NO: 359 - RNA, 19 nt, Artificial Sequence
  Description of Artificial Sequence: synthetic
guugcucuuucucuaucuu

SEQ ID NO: 360 - RNA, 19 nt, Artificial Sequence
  Description of Artificial Sequence: synthetic
guggaugaaccggcugaua

SEQ ID NO: 361 - RNA, 19 nt, Artificial Sequence
  Description of Artificial Sequence: synthetic
ccaggacccccccucccgg

SEQ ID NO: 362 - RNA, 19 nt, Artificial Sequence
  Description of Artificial Sequence: synthetic
gggugggcaggauggcucc

SEQ ID NO: 363 - RNA, 19 nt, Artificial Sequence
  Description of Artificial Sequence: synthetic
cuucacggaggcuaugacu

SEQ ID NO: 364 - RNA, 19 nt, Artificial Sequence
  Description of Artificial Sequence: synthetic
accgccgcccacaggacgu

SEQ ID NO: 365 - RNA, 19 nt, Artificial Sequence
  Description of Artificial Sequence: synthetic
uccaggacccccccucccg

SEQ ID NO: 366 - RNA, 19 nt, Artificial Sequence
  Description of Artificial Sequence: synthetic
auaugaugaugaacugguc

SEQ ID NO: 367 - RNA, 19 nt, Artificial Sequence
  Description of Artificial Sequence: synthetic
uucacggaggcuaugacua

SEQ ID NO: 368 - RNA, 19 nt, Artificial Sequence
  Description of Artificial Sequence: synthetic
ucacggaggcuaugacuag

SEQ ID NO: 369 - RNA, 19 nt, Artificial Sequence
  Description of Artificial Sequence: synthetic
augaaccggcugauagcgu

SEQ ID NO: 370 - RNA, 19 nt, Artificial Sequence
  Description of Artificial Sequence: synthetic
gggauaugaugaugaacug

SEQ ID NO: 371 - RNA, 19 nt, Artificial Sequence
  Description of Artificial Sequence: synthetic
ugcaguggaugaaccggcu

SEQ ID NO: 372 - RNA, 19 nt, Artificial Sequence
  Description of Artificial Sequence: synthetic
gugcaguggaugaaccggc

SEQ ID NO: 373 - RNA, 19 nt, Artificial Sequence
  Description of Artificial Sequence: synthetic
ugaaccggcugauagcguu

SEQ ID NO: 374 - RNA, 19 nt, Artificial Sequence
  Description of Artificial Sequence: synthetic
ggauaugaugaugaacugg

SEQ ID NO: 375 - RNA, 19 nt, Artificial Sequence
  Description of Artificial Sequence: synthetic
gcucuuucucuaucuuccu

SEQ ID NO: 376 - RNA, 19 nt, Artificial Sequence
  Description of Artificial Sequence: synthetic
gggggcgacacuccaccau

SEQ ID NO: 377 - RNA, 19 nt, Artificial Sequence
  Description of Artificial Sequence: synthetic
gaugaaccggcugauagcg

SEQ ID NO: 378 - RNA, 19 nt, Artificial Sequence
  Description of Artificial Sequence: synthetic
gauaugaugaugaacuggu

SEQ ID NO: 379 - RNA, 19 nt, Artificial Sequence
  Description of Artificial Sequence: synthetic
ugggauaugaugaugaacu

SEQ ID NO: 380 - RNA, 19 nt, Artificial Sequence
  Description of Artificial Sequence: synthetic
uugcucuuucucuaucuuc

SEQ ID NO: 381 - RNA, 19 nt, Artificial Sequence
  Description of Artificial Sequence: synthetic
ugggggcgacacuccacca

SEQ ID NO: 382 - RNA, 19 nt, Artificial Sequence
  Description of Artificial Sequence: synthetic
ugcucuuucucuaucuucc

SEQ ID NO: 383 - RNA, 19 nt, Artificial Sequence
  Description of Artificial Sequence: synthetic
gguccuuucuuggaucaac

SEQ ID NO: 384 - RNA, 19 nt, Artificial Sequence
  Description of Artificial Sequence: synthetic
aagacuuccgagcggucgc

SEQ ID NO: 385 - RNA, 19 nt, Artificial Sequence
  Description of Artificial Sequence: synthetic
agcccggguacccuuggcc

SEQ ID NO: 386 - RNA, 19 nt, Artificial Sequence
  Description of Artificial Sequence: synthetic
uuucuuggaucaacccgcu

SEQ ID NO: 387 - RNA, 19 nt, Artificial Sequence
  Description of Artificial Sequence: synthetic
cagcccggguacccuuggc

SEQ ID NO: 388 - RNA, 19 nt, Artificial Sequence
  Description of Artificial Sequence: synthetic
agacuuccgagcggucgca

SEQ ID NO: 389 - RNA, 19 nt, Artificial Sequence
  Description of Artificial Sequence: synthetic
uucuuggaucaacccgcuc

SEQ ID NO: 390 - RNA, 19 nt, Artificial Sequence
  Description of Artificial Sequence: synthetic
cccggguacccuuggcccc

SEQ ID NO: 391 - RNA, 19 nt, Artificial Sequence
  Description of Artificial Sequence: synthetic
guccuuucuuggaucaacc

SEQ ID NO: 392 - RNA, 19 nt, Artificial Sequence
  Description of Artificial Sequence: synthetic
cuuucuuggaucaacccgc

SEQ ID NO: 393 - RNA, 19 nt, Artificial Sequence
  Description of Artificial Sequence: synthetic
ccuuucuuggaucaacccg

SEQ ID NO: 394 - RNA, 19 nt, Artificial Sequence
  Description of Artificial Sequence: synthetic
uccuuucuuggaucaaccc

SEQ ID NO: 395 - RNA, 19 nt, Artificial Sequence
  Description of Artificial Sequence: synthetic
aaguucccgggcggugguc

SEQ ID NO: 396 - RNA, 19 nt, Artificial Sequence
  Description of Artificial Sequence: synthetic
gcaguggaugaaccggcug

SEQ ID NO: 397 - RNA, 19 nt, Artificial Sequence
  Description of Artificial Sequence: synthetic
ccggguacccuuggccccu

SEQ ID NO: 398 - RNA, 19 nt, Artificial Sequence
  Description of Artificial Sequence: synthetic
aguucccgggcggugguca

SEQ ID NO: 399 - RNA, 19 nt, Artificial Sequence
  Description of Artificial Sequence: synthetic
cuuggaucaacccgcucaa

SEQ ID NO: 400 - RNA, 19 nt, Artificial Sequence
  Description of Artificial Sequence: synthetic
ggaucaacccgcucaaugc

SEQ ID NO: 401 - RNA, 19 nt, Artificial Sequence
  Description of Artificial Sequence: synthetic
acuuccgagcggucgcaac

SEQ ID NO: 402 - RNA, 19 nt, Artificial Sequence
  Description of Artificial Sequence: synthetic
ucuuggaucaacccgcuca

SEQ ID NO: 403 - RNA, 19 nt, Artificial Sequence
  Description of Artificial Sequence: synthetic
uuggaucaacccgcucaau

SEQ ID NO: 404 - RNA, 19 nt, Artificial Sequence
  Description of Artificial Sequence: synthetic
aaccgccgcccacaggacg

SEQ ID NO: 405 - RNA, 19 nt, Artificial Sequence
  Description of Artificial Sequence: synthetic
gcgugaacuaugcaacagg

SEQ ID NO: 406 - RNA, 19 nt, Artificial Sequence
  Description of Artificial Sequence: synthetic
aucaacccgcucaaugccu

SEQ ID NO: 407 - RNA, 19 nt, Artificial Sequence
  Description of Artificial Sequence: synthetic
gaucaacccgcucaaugcc

SEQ ID NO: 408 - RNA, 19 nt, Artificial Sequence
  Description of Artificial Sequence: synthetic
caacccgcucaaugccugg

SEQ ID NO: 409 - RNA, 19 nt, Artificial Sequence
  Description of Artificial Sequence: synthetic
gcuucgccgaccucauggg

SEQ ID NO: 410 - RNA, 19 nt, Artificial Sequence
  Description of Artificial Sequence: synthetic
gacuuccgagcggucgcaa

SEQ ID NO: 411 - RNA, 19 nt, Artificial Sequence
  Description of Artificial Sequence: synthetic
ucaacccgcucaaugccug

SEQ ID NO: 412 - RNA, 19 nt, Artificial Sequence
  Description of Artificial Sequence: synthetic
ggcuucgccgaccucaugg

SEQ ID NO: 413 - RNA, 19 nt, Artificial Sequence
  Description of Artificial Sequence: synthetic
uggaucaacccgcucaaug

SEQ ID NO: 414 - RNA, 19 nt, Artificial Sequence
  Description of Artificial Sequence: synthetic
cgggcgguggucagaucgu

SEQ ID NO: 415 - RNA, 19 nt, Artificial Sequence
  Description of Artificial Sequence: synthetic
cuuggccccucuauggcaa

SEQ ID NO: 416 - RNA, 19 nt, Artificial Sequence
  Description of Artificial Sequence: synthetic
ccgggcgguggucagaucg

SEQ ID NO: 417 - RNA, 19 nt, Artificial Sequence
  Description of Artificial Sequence: synthetic
uggggugggcaggauggcu

SEQ ID NO: 418 - RNA, 19 nt, Artificial Sequence
  Description of Artificial Sequence: synthetic
ggaguuuaccuguugccgc

SEQ ID NO: 419 - RNA, 19 nt, Artificial Sequence
  Description of Artificial Sequence: synthetic
ccuuggccccucuauggca

SEQ ID NO: 420 - RNA, 19 nt, Artificial Sequence
  Description of Artificial Sequence: synthetic
guggaguuuaccuguugcc

SEQ ID NO: 421 - RNA, 19 nt, Artificial Sequence
  Description of Artificial Sequence: synthetic
gguggaguuuaccuguugc

SEQ ID NO: 422 - RNA, 19 nt, Artificial Sequence
  Description of Artificial Sequence: synthetic
uucccgggcgguggucaga

SEQ ID NO: 423 - RNA, 19 nt, Artificial Sequence
  Description of Artificial Sequence: synthetic
ugaacuaugcaacagggaa

SEQ ID NO: 424 - RNA, 19 nt, Artificial Sequence
  Description of Artificial Sequence: synthetic
aguuuaccuguugccgcgc

SEQ ID NO: 425 - RNA, 19 nt, Artificial Sequence
  Description of Artificial Sequence: synthetic
gugaacuaugcaacaggga

SEQ ID NO: 426 - RNA, 19 nt, Artificial Sequence
  Description of Artificial Sequence: synthetic
uuaccuguugccgcgcagg

SEQ ID NO: 427 - RNA, 19 nt, Artificial Sequence
  Description of Artificial Sequence: synthetic
ucccgggcgguggucagau

SEQ ID NO: 428 - RNA, 19 nt, Artificial Sequence
  Description of Artificial Sequence: synthetic
guucccgggcgguggucag

SEQ ID NO: 429 - RNA, 19 nt, Artificial Sequence
  Description of Artificial Sequence: synthetic
gcccggguacccuuggccc

SEQ ID NO: 430 - RNA, 19 nt, Artificial Sequence
  Description of Artificial Sequence: synthetic
aaggagaugaaggcgaagg

SEQ ID NO: 431 - RNA, 19 nt, Artificial Sequence
  Description of Artificial Sequence: synthetic
aggagaugaaggcgaaggc

SEQ ID NO: 432 - RNA, 19 nt, Artificial Sequence
  Description of Artificial Sequence: synthetic
guuuaccuguugccgcgca

SEQ ID NO: 433 - RNA, 19 nt, Artificial Sequence
  Description of Artificial Sequence: synthetic
cuguugccgcgcaggggcc

SEQ ID NO: 434 - RNA, 19 nt, Artificial Sequence
  Description of Artificial Sequence: synthetic
aacaccaaccgccgcccac

SEQ ID NO: 435 - RNA, 19 nt, Artificial Sequence
  Description of Artificial Sequence: synthetic
gaguuuaccuguugccgcg

SEQ ID NO: 436 - RNA, 19 nt, Artificial Sequence
  Description of Artificial Sequence: synthetic
uuuaccuguugccgcgcag

SEQ ID NO: 437 - RNA, 19 nt, Artificial Sequence
  Description of Artificial Sequence: synthetic
ggggugggcaggauggcuc

SEQ ID NO: 438 - RNA, 19 nt, Artificial Sequence
  Description of Artificial Sequence: synthetic
gaagacuuccgagcggucg

SEQ ID NO: 439 - RNA, 19 nt, Artificial Sequence
  Description of Artificial Sequence: synthetic
accuguugccgcgcagggg

SEQ ID NO: 440 - RNA, 19 nt, Artificial Sequence
  Description of Artificial Sequence: synthetic
uaccuguugccgcgcaggg

SEQ ID NO: 441 - RNA, 19 nt, Artificial Sequence
  Description of Artificial Sequence: synthetic
uaccucuucaacugggcag

SEQ ID NO: 442 - RNA, 19 nt, Artificial Sequence
  Description of Artificial Sequence: synthetic
cgugaacuaugcaacaggg

SEQ ID NO: 443 - RNA, 19 nt, Artificial Sequence
  Description of Artificial Sequence: synthetic
acaccaaccgccgcccaca

SEQ ID NO: 444 - RNA, 19 nt, Artificial Sequence
  Description of Artificial Sequence: synthetic
cccgggcgguggucagauc

SEQ ID NO: 445 - RNA, 19 nt, Artificial Sequence
  Description of Artificial Sequence: synthetic
accucuucaacugggcagu

SEQ ID NO: 446 - RNA, 19 nt, Artificial Sequence
  Description of Artificial Sequence: synthetic
cuucgccgaccucaugggg

SEQ ID NO: 447 - RNA, 19 nt, Artificial Sequence
  Description of Artificial Sequence: synthetic
ccuguugccgcgcaggggc

SEQ ID NO: 448 - RNA, 19 nt, Artificial Sequence
  Description of Artificial Sequence: synthetic
ccaaccgccgcccacagga

SEQ ID NO: 449 - RNA, 19 nt, Artificial Sequence
  Description of Artificial Sequence: synthetic
accaaccgccgcccacagg

SEQ ID NO: 450 - RNA, 19 nt, Artificial Sequence
  Description of Artificial Sequence: synthetic
uggaguuuaccuguugccg

SEQ ID NO: 451 - RNA, 19 nt, Artificial Sequence
  Description of Artificial Sequence: synthetic
caccaaccgccgcccacag

SEQ ID NO: 452 - RNA, 19 nt, Artificial Sequence
  Description of Artificial Sequence: synthetic
caaacguaacaccaaccgc

SEQ ID NO: 453 - RNA, 19 nt, Artificial Sequence
  Description of Artificial Sequence: synthetic
caagcggagacggcuggag

SEQ ID NO: 454 - RNA, 19 nt, Artificial Sequence
  Description of Artificial Sequence: synthetic
acggaggcuaugacuaggu

SEQ ID NO: 455 - RNA, 19 nt, Artificial Sequence
  Description of Artificial Sequence: synthetic
uaacaccaaccgccgccca

SEQ ID NO: 456 - RNA, 19 nt, Artificial Sequence
  Description of Artificial Sequence: synthetic
aucguugguggaguuuacc

SEQ ID NO: 457 - RNA, 19 nt, Artificial Sequence
  Description of Artificial Sequence: synthetic
gggagacauauaucacagc

SEQ ID NO: 458 - RNA, 19 nt, Artificial Sequence
  Description of Artificial Sequence: synthetic
aaccucguggaaggcgaca

SEQ ID NO: 459 - RNA, 19 nt, Artificial Sequence
  Description of Artificial Sequence: synthetic
gggggagacauauaucaca

SEQ ID NO: 460 - RNA, 19 nt, Artificial Sequence
  Description of Artificial Sequence: synthetic
aacguaacaccaaccgccg

SEQ ID NO: 461 - RNA, 19 nt, Artificial Sequence
  Description of Artificial Sequence: synthetic
aaacguaacaccaaccgcc

SEQ ID NO: 462 - RNA, 19 nt, Artificial Sequence
  Description of Artificial Sequence: synthetic
ggggagacauauaucacag

SEQ ID NO: 463 - RNA, 19 nt, Artificial Sequence
  Description of Artificial Sequence: synthetic
gagaugaaggcgaaggcgu

SEQ ID NO: 464 - RNA, 19 nt, Artificial Sequence
  Description of Artificial Sequence: synthetic
aagcggagacggcuggagc

SEQ ID NO: 465 - RNA, 19 nt, Artificial Sequence
  Description of Artificial Sequence: synthetic
guacccuuggccccucuau

SEQ ID NO: 466 - RNA, 19 nt, Artificial Sequence
  Description of Artificial Sequence: synthetic
ccuccaggacccccccucc

SEQ ID NO: 467 - RNA, 19 nt, Artificial Sequence
  Description of Artificial Sequence: synthetic
cuccaggacccccccuccc

SEQ ID NO: 468 - RNA, 19 nt, Artificial Sequence
  Description of Artificial Sequence: synthetic
uacccuuggccccucuaug

SEQ ID NO: 469 - RNA, 19 nt, Artificial Sequence
  Description of Artificial Sequence: synthetic
caaccucguggaaggcgac

SEQ ID NO: 470 - RNA, 19 nt, Artificial Sequence
  Description of Artificial Sequence: synthetic
cggaggcuaugacuaggua

SEQ ID NO: 471 - RNA, 19 nt, Artificial Sequence
  Description of Artificial Sequence: synthetic
ggagaugaaggcgaaggcg

SEQ ID NO: 472 - RNA, 19 nt, Artificial Sequence
  Description of Artificial Sequence: synthetic
agaugaaggcgaaggcguc

SEQ ID NO: 473 - RNA, 19 nt, Artificial Sequence
  Description of Artificial Sequence: synthetic
guaacaccaaccgccgccc

SEQ ID NO: 474 - RNA, 19 nt, Artificial Sequence
  Description of Artificial Sequence: synthetic
cguaacaccaaccgccgcc

SEQ ID NO: 475 - RNA, 19 nt, Artificial Sequence
  Description of Artificial Sequence: synthetic
acguaacaccaaccgccgc

SEQ ID NO: 476 - RNA, 19 nt, Artificial Sequence
  Description of Artificial Sequence: synthetic
cacggaggcuaugacuagg

SEQ ID NO: 477 - RNA, 19 nt, Artificial Sequence
  Description of Artificial Sequence: synthetic
guugguggaguuuaccugu

SEQ ID NO: 478 - RNA, 19 nt, Artificial Sequence
  Description of Artificial Sequence: synthetic
cguugguggaguuuaccug

SEQ ID NO: 479 - RNA, 19 nt, Artificial Sequence
  Description of Artificial Sequence: synthetic
acccuuggccccucuaugg

SEQ ID NO: 480 - RNA, 19 nt, Artificial Sequence
  Description of Artificial Sequence: synthetic
uugguggaguuuaccuguu

SEQ ID NO: 481 - RNA, 19 nt, Artificial Sequence
  Description of Artificial Sequence: synthetic
ugguggaguuuaccuguug

SEQ ID NO: 482 - RNA, 19 nt, Artificial Sequence
  Description of Artificial Sequence: synthetic
ucguugguggaguuuaccu

SEQ ID NO: 483 - RNA, 19 nt, Artificial Sequence
  Description of Artificial Sequence: synthetic
cggguacccuuggccccuc

SEQ ID NO: 484 - RNA, 19 nt, Artificial Sequence
  Description of Artificial Sequence: synthetic
ggcucagcccggguacccu

SEQ ID NO: 485 - RNA, 19 nt, Artificial Sequence
  Description of Artificial Sequence: synthetic
gaucacuccccugugagga

SEQ ID NO: 486 - RNA, 19 nt, Artificial Sequence
  Description of Artificial Sequence: synthetic
gguggucagaucguuggug

SEQ ID NO: 487 - RNA, 19 nt, Artificial Sequence
  Description of Artificial Sequence: synthetic
gaugaaggcgaaggcgucc

SEQ ID NO: 488 - RNA, 19 nt, Artificial Sequence
  Description of Artificial Sequence: synthetic
aggauggcuccugucaccc

SEQ ID NO: 489 - RNA, 19 nt, Artificial Sequence
  Description of Artificial Sequence: synthetic
cucagcccggguacccuug

SEQ ID NO: 490 - RNA, 19 nt, Artificial Sequence
  Description of Artificial Sequence: synthetic
ucagcccggguacccuugg

SEQ ID NO: 491 - RNA, 19 nt, Artificial Sequence
  Description of Artificial Sequence: synthetic
augaaggcgaaggcgucca

SEQ ID NO: 492 - RNA, 19 nt, Artificial Sequence
  Description of Artificial Sequence: synthetic
cgggggagacauauaucac

SEQ ID NO: 493 - RNA, 19 nt, Artificial Sequence
  Description of Artificial Sequence: synthetic
caggauggcuccugucacc

SEQ ID NO: 494 - RNA, 19 nt, Artificial Sequence
  Description of Artificial Sequence: synthetic
ugaaggcgaaggcguccac

SEQ ID NO: 495 - RNA, 19 nt, Artificial Sequence
  Description of Artificial Sequence: synthetic
uggucagaucguuggugga

SEQ ID NO: 496 - RNA, 19 nt, Artificial Sequence
  Description of Artificial Sequence: synthetic
gcucagcccggguacccuu

SEQ ID NO: 497 - RNA, 19 nt, Artificial Sequence
  Description of Artificial Sequence: synthetic
guggucagaucguuggugg

SEQ ID NO: 498 - RNA, 19 nt, Artificial Sequence
  Description of Artificial Sequence: synthetic
cagccuccaggaccccccc

SEQ ID NO: 499 - RNA, 19 nt, Artificial Sequence
  Description of Artificial Sequence: synthetic
ggcgguggucagaucguug

SEQ ID NO: 500 - RNA, 19 nt, Artificial Sequence
  Description of Artificial Sequence: synthetic
gccuccaggacccccccuc

SEQ ID NO: 501 - RNA, 19 nt, Artificial Sequence
  Description of Artificial Sequence: synthetic
aaccggcugauagcguucg

SEQ ID NO: 502 - RNA, 19 nt, Artificial Sequence
  Description of Artificial Sequence: synthetic
agccuccaggacccccccu

SEQ ID NO: 503 - RNA, 19 nt, Artificial Sequence
  Description of Artificial Sequence: synthetic
cggcuucgccgaccucaug

SEQ ID NO: 504 - RNA, 19 nt, Artificial Sequence
  Description of Artificial Sequence: synthetic
gcggagacggcuggagcgc

SEQ ID NO: 505 - RNA, 19 nt, Artificial Sequence
  Description of Artificial Sequence: synthetic
ucaugggguacauuccgcu

SEQ ID NO: 506 - RNA, 19 nt, Artificial Sequence
  Description of Artificial Sequence: synthetic
gaaccggcugauagcguuc

SEQ ID NO: 507 - RNA, 19 nt, Artificial Sequence
  Description of Artificial Sequence: synthetic
gcgguggucagaucguugg

SEQ ID NO: 508 - RNA, 19 nt, Artificial Sequence
  Description of Artificial Sequence: synthetic
ggcaggauggcuccuguca

SEQ ID NO: 509 - RNA, 19 nt, Artificial Sequence
  Description of Artificial Sequence: synthetic
gcaggauggcuccugucac

SEQ ID NO: 510 - RNA, 19 nt, Artificial Sequence
  Description of Artificial Sequence: synthetic
auuuggguaaggucaucga

SEQ ID NO: 511 - RNA, 19 nt, Artificial Sequence
  Description of Artificial Sequence: synthetic
accggcugauagcguucgc

SEQ ID NO: 512 - RNA, 19 nt, Artificial Sequence
  Description of Artificial Sequence: synthetic
cggagacggcuggagcgcg

SEQ ID NO: 513 - RNA, 19 nt, Artificial Sequence
  Description of Artificial Sequence: synthetic
gcggcuucgccgaccucau

SEQ ID NO: 514 - RNA, 19 nt, Artificial Sequence
  Description of Artificial Sequence: synthetic
aauuuggguaaggucaucg

SEQ ID NO: 515 - RNA, 19 nt, Artificial Sequence
  Description of Artificial Sequence: synthetic
gggcgguggucagaucguu

SEQ ID NO: 516 - RNA, 19 nt, Artificial Sequence
  Description of Artificial Sequence: synthetic
caaccgccgcccacaggac

SEQ ID NO: 517 - RNA, 19 nt, Artificial Sequence
  Description of Artificial Sequence: synthetic
ugcggcuucgccgaccuca

SEQ ID NO: 518 - RNA, 19 nt, Artificial Sequence
  Description of Artificial Sequence: synthetic
cgguggucagaucguuggu

SEQ ID NO: 519 - RNA, 19 nt, Artificial Sequence
  Description of Artificial Sequence: synthetic
uugggugugcgcgcgacua

SEQ ID NO: 520 - RNA, 19 nt, Artificial Sequence
  Description of Artificial Sequence: synthetic
gugugcgcgcgacuaggaa

SEQ ID NO: 521 - RNA, 19 nt, Artificial Sequence
  Description of Artificial Sequence: synthetic
gauggcuccugucaccccg

SEQ ID NO: 522 - RNA, 19 nt, Artificial Sequence
  Description of Artificial Sequence: synthetic
ggauggcuccugucacccc

SEQ ID NO: 523 - RNA, 19 nt, Artificial Sequence
  Description of Artificial Sequence: synthetic
ugugcgcgcgacuaggaag

SEQ ID NO: 524 - RNA, 19 nt, Artificial Sequence
  Description of Artificial Sequence: synthetic
ugggugugcgcgcgacuag

SEQ ID NO: 525 - RNA, 19 nt, Artificial Sequence
  Description of Artificial Sequence: synthetic
ggugugcgcgcgacuagga

SEQ ID NO: 526 - RNA, 19 nt, Artificial Sequence
  Description of Artificial Sequence: synthetic
gggugugcgcgcgacuagg

SEQ ID NO: 527 - RNA, 19 nt, Artificial Sequence
  Description of Artificial Sequence: synthetic
ccccggcguaggucgcgua

SEQ ID NO: 528 - RNA, 19 nt, Artificial Sequence
  Description of Artificial Sequence: synthetic
gaaggcgacaaccuauccc

SEQ ID NO: 529 - RNA, 19 nt, Artificial Sequence
  Description of Artificial Sequence: synthetic
cccggcguaggucgcguaa

SEQ ID NO: 530 - RNA, 19 nt, Artificial Sequence
  Description of Artificial Sequence: synthetic
agcggagacggcuggagcg

SEQ ID NO: 531 - RNA, 19 nt, Artificial Sequence
  Description of Artificial Sequence: synthetic
cccccggcguaggucgcgu

SEQ ID NO: 532 - RNA, 19 nt, Artificial Sequence
  Description of Artificial Sequence: synthetic
aggcgaaggcguccacagu

SEQ ID NO: 533 - RNA, 19 nt, Artificial Sequence
  Description of Artificial Sequence: synthetic
aaggcgaaggcguccacag

SEQ ID NO: 534 - RNA, 19 nt, Artificial Sequence
  Description of Artificial Sequence: synthetic
guugggugugcgcgcgacu

SEQ ID NO: 535 - RNA, 19 nt, Artificial Sequence
  Description of Artificial Sequence: synthetic
cucaugggguacauuccgc

SEQ ID NO: 536 - RNA, 19 nt, Artificial Sequence
  Description of Artificial Sequence: synthetic
ggaaggcgacaaccuaucc

SEQ ID NO: 537 - RNA, 19 nt, Artificial Sequence
  Description of Artificial Sequence: synthetic
gcaaguuccuugccgacgg

SEQ ID NO: 538 - RNA, 19 nt, Artificial Sequence
  Description of Artificial Sequence: synthetic
ugcagccuccaggaccccc

SEQ ID NO: 539 - RNA, 19 nt, Artificial Sequence
  Description of Artificial Sequence: synthetic
ggacugcacgaugcucgug

SEQ ID NO: 540 - RNA, 19 nt, Artificial Sequence
  Description of Artificial Sequence: synthetic
gaaggcgaaggcguccaca

SEQ ID NO: 541 - RNA, 19 nt, Artificial Sequence
  Description of Artificial Sequence: synthetic
gcaaccucguggaaggcga

SEQ ID NO: 542 - RNA, 19 nt, Artificial Sequence
  Description of Artificial Sequence: synthetic
gacgcgggcugugcuuggu

SEQ ID NO: 543 - RNA, 19 nt, Artificial Sequence
  Description of Artificial Sequence: synthetic
acgcgggcugugcuuggua

SEQ ID NO: 544 - RNA, 19 nt, Artificial Sequence
  Description of Artificial Sequence: synthetic
gugcagccuccaggacccc

SEQ ID NO: 545 - RNA, 19 nt, Artificial Sequence
  Description of Artificial Sequence: synthetic
gcagccuccaggacccccc

SEQ ID NO: 546 - RNA, 19 nt, Artificial Sequence
  Description of Artificial Sequence: synthetic
cgcaaccucguggaaggcg

SEQ ID NO: 547 - RNA, 19 nt, Artificial Sequence
  Description of Artificial Sequence: synthetic
ugucgugcagccuccagga

SEQ ID NO: 548 - RNA, 19 nt, Artificial Sequence
  Description of Artificial Sequence: synthetic
auggcuugggauaugauga

SEQ ID NO: 549 - RNA, 19 nt, Artificial Sequence
  Description of Artificial Sequence: synthetic
cuugggauaugaugaugaa

SEQ ID NO: 550 - RNA, 19 nt, Artificial Sequence
  Description of Artificial Sequence: synthetic
cccuuggccccucuauggc

SEQ ID NO: 551 - RNA, 19 nt, Artificial Sequence
  Description of Artificial Sequence: synthetic
uggcuugggauaugaugau

SEQ ID NO: 552 - RNA, 19 nt, Artificial Sequence
  Description of Artificial Sequence: synthetic
cugugcaguggaugaaccg

SEQ ID NO: 553 - RNA, 19 nt, Artificial Sequence
  Description of Artificial Sequence: synthetic
augacgcgggcugugcuug

SEQ ID NO: 554 - RNA, 19 nt, Artificial Sequence
  Description of Artificial Sequence: synthetic
gcuugggauaugaugauga

SEQ ID NO: 555 - RNA, 19 nt, Artificial Sequence
  Description of Artificial Sequence: synthetic
uaugacgcgggcugugcuu

SEQ ID NO: 556 - RNA, 19 nt, Artificial Sequence
  Description of Artificial Sequence: synthetic
ugacgcgggcugugcuugg

SEQ ID NO: 557 - RNA, 19 nt, Artificial Sequence
  Description of Artificial Sequence: synthetic
ggcuugggauaugaugaug

SEQ ID NO: 558 - RNA, 19 nt, Artificial Sequence
  Description of Artificial Sequence: synthetic
ugugcaguggaugaaccgg

SEQ ID NO: 559 - RNA, 19 nt, Artificial Sequence
  Description of Artificial Sequence: synthetic
gcugugcaguggaugaacc

SEQ ID NO: 560 - RNA, 19 nt, Artificial Sequence
  Description of Artificial Sequence: synthetic
cucuucaacugggcaguaa

SEQ ID NO: 561 - RNA, 19 nt, Artificial Sequence
  Description of Artificial Sequence: synthetic
ccucguggaaggcgacaac

SEQ ID NO: 562 - RNA, 19 nt, Artificial Sequence
  Description of Artificial Sequence: synthetic
ugugucacccagacagucg

SEQ ID NO: 563 - RNA, 19 nt, Artificial Sequence
  Description of Artificial Sequence: synthetic
ggcgugaacuaugcaacag

SEQ ID NO: 564 - RNA, 19 nt, Artificial Sequence
  Description of Artificial Sequence: synthetic
cggcgugaacuaugcaaca

SEQ ID NO: 565 - RNA, 19 nt, Artificial Sequence
  Description of Artificial Sequence: synthetic
gugucacccagacagucga

SEQ ID NO: 566 - RNA, 19 nt, Artificial Sequence
  Description of Artificial Sequence: synthetic
ccucuucaacugggcagua

SEQ ID NO: 567 - RNA, 19 nt, Artificial Sequence
  Description of Artificial Sequence: synthetic
cguggaaggcgacaaccua

SEQ ID NO: 568 - RNA, 19 nt, Artificial Sequence
  Description of Artificial Sequence: synthetic
ucguggaaggcgacaaccu

SEQ ID NO: 569 - RNA, 19 nt, Artificial Sequence
  Description of Artificial Sequence: synthetic
cggccuaguuggggcccca

SEQ ID NO: 570 - RNA, 19 nt, Artificial Sequence
  Description of Artificial Sequence: synthetic
cgacuaggaagacuuccga

SEQ ID NO: 571 - RNA, 19 nt, Artificial Sequence
  Description of Artificial Sequence: synthetic
uuuggguaaggucaucgau

SEQ ID NO: 572 - RNA, 19 nt, Artificial Sequence
  Description of Artificial Sequence: synthetic
guggaaggcgacaaccuau

SEQ ID NO: 573 - RNA, 19 nt, Artificial Sequence
  Description of Artificial Sequence: synthetic
accucguggaaggcgacaa

SEQ ID NO: 574 - RNA, 19 nt, Artificial Sequence
  Description of Artificial Sequence: synthetic
gcgacuaggaagacuuccg

SEQ ID NO: 575 - RNA, 19 nt, Artificial Sequence
  Description of Artificial Sequence: synthetic
gucgugcagccuccaggac

SEQ ID NO: 576 - RNA, 19 nt, Artificial Sequence
  Description of Artificial Sequence: synthetic
uaggaagacuuccgagcgg

SEQ ID NO: 577 - RNA, 19 nt, Artificial Sequence
  Description of Artificial Sequence: synthetic
acggcgugaacuaugcaac

SEQ ID NO: 578 - RNA, 19 nt, Artificial Sequence
  Description of Artificial Sequence: synthetic
cucguggaaggcgacaacc

SEQ ID NO: 579 - RNA, 19 nt, Artificial Sequence
  Description of Artificial Sequence: synthetic
ggucgcaaccucguggaag

SEQ ID NO: 580 - RNA, 19 nt, Artificial Sequence
  Description of Artificial Sequence: synthetic
cggucgcaaccucguggaa

SEQ ID NO: 581 - RNA, 19 nt, Artificial Sequence
  Description of Artificial Sequence: synthetic
gcgcgcgacuaggaagacu

SEQ ID NO: 582 - RNA, 19 nt, Artificial Sequence
  Description of Artificial Sequence: synthetic
gacggcgugaacuaugcaa

SEQ ID NO: 583 - RNA, 19 nt, Artificial Sequence
  Description of Artificial Sequence: synthetic
uagaucacuccccugugag

SEQ ID NO: 584 - RNA, 19 nt, Artificial Sequence
  Description of Artificial Sequence: synthetic
agcggucgcaaccucgugg

SEQ ID NO: 585 - RNA, 19 nt, Artificial Sequence
  Description of Artificial Sequence: synthetic
uggaaggcgacaaccuauc

SEQ ID NO: 586 - RNA, 19 nt, Artificial Sequence
  Description of Artificial Sequence: synthetic
cgcgcgacuaggaagacuu

SEQ ID NO: 587 - RNA, 19 nt, Artificial Sequence
  Description of Artificial Sequence: synthetic
cuaggaagacuuccgagcg

SEQ ID NO: 588 - RNA, 19 nt, Artificial Sequence
  Description of Artificial Sequence: synthetic
gugcgcgcgacuaggaaga

SEQ ID NO: 589 - RNA, 19 nt, Artificial Sequence
  Description of Artificial Sequence: synthetic
agaucacuccccugugagg

SEQ ID NO: 590 - RNA, 19 nt, Artificial Sequence
  Description of Artificial Sequence: synthetic
ugcgcgcgacuaggaagac

SEQ ID NO: 591 - RNA, 19 nt, Artificial Sequence
  Description of Artificial Sequence: synthetic
auagaucacuccccuguga

SEQ ID NO: 592 - RNA, 19 nt, Artificial Sequence
  Description of Artificial Sequence: synthetic
gagcggucgcaaccucgug

SEQ ID NO: 593 - RNA, 19 nt, Artificial Sequence
  Description of Artificial Sequence: synthetic
cacgaacgacugcuccaac

SEQ ID NO: 594 - RNA, 19 nt, Artificial Sequence
  Description of Artificial Sequence: synthetic
ggcaaguuccuugccgacg

SEQ ID NO: 595 - RNA, 19 nt, Artificial Sequence
  Description of Artificial Sequence: synthetic
ucgugcagccuccaggacc

SEQ ID NO: 596 - RNA, 19 nt, Artificial Sequence
  Description of Artificial Sequence: synthetic
gucacgaacgacugcucca

SEQ ID NO: 597 - RNA, 19 nt, Artificial Sequence
  Description of Artificial Sequence: synthetic
gcggucgcaaccucgugga

SEQ ID NO: 598 - RNA, 19 nt, Artificial Sequence
  Description of Artificial Sequence: synthetic
gcgcgacuaggaagacuuc

SEQ ID NO: 599 - RNA, 19 nt, Artificial Sequence
  Description of Artificial Sequence: synthetic
gcuaugacgcgggcugugc

SEQ ID NO: 600 - RNA, 19 nt, Artificial Sequence
  Description of Artificial Sequence: synthetic
ucacgaacgacugcuccaa

SEQ ID NO: 601 - RNA, 19 nt, Artificial Sequence
  Description of Artificial Sequence: synthetic
ucgcaaccucguggaaggc

SEQ ID NO: 602 - RNA, 19 nt, Artificial Sequence
  Description of Artificial Sequence: synthetic
cgugcagccuccaggaccc

SEQ ID NO: 603 - RNA, 19 nt, Artificial Sequence
  Description of Artificial Sequence: synthetic
gucgcaaccucguggaagg

SEQ ID NO: 604 - RNA, 19 nt, Artificial Sequence
  Description of Artificial Sequence: synthetic
acuaggaagacuuccgagc

SEQ ID NO: 605 - RNA, 19 nt, Artificial Sequence
  Description of Artificial Sequence: synthetic
cgcgacuaggaagacuucc

SEQ ID NO: 606 - RNA, 19 nt, Artificial Sequence
  Description of Artificial Sequence: synthetic
ugggcgaagcacaugugga

SEQ ID NO: 607 - RNA, 19 nt, Artificial Sequence
  Description of Artificial Sequence: synthetic
ccuugccuacuauuccaug

SEQ ID NO: 608 - RNA, 19 nt, Artificial Sequence
  Description of Artificial Sequence: synthetic
gccucaggaaacuuggggu

SEQ ID NO: 609 - RNA, 19 nt, Artificial Sequence
  Description of Artificial Sequence: synthetic
ugcuaugacgcgggcugug

SEQ ID NO: 610 - RNA, 19 nt, Artificial Sequence
  Description of Artificial Sequence: synthetic
ucgugcucgccaccgcuac

SEQ ID NO: 611 - RNA, 19 nt, Artificial Sequence
  Description of Artificial Sequence: synthetic
ugccucaggaaacuugggg

SEQ ID NO: 612 - RNA, 19 nt, Artificial Sequence
  Description of Artificial Sequence: synthetic
ugucucgugcccgaccccg

SEQ ID NO: 613 - RNA, 19 nt, Artificial Sequence
  Description of Artificial Sequence: synthetic
uguggcggcaggagauggg

SEQ ID NO: 614 - RNA, 19 nt, Artificial Sequence
  Description of Artificial Sequence: synthetic
gucgugcucgccaccgcua

SEQ ID NO: 615 - RNA, 19 nt, Artificial Sequence
  Description of Artificial Sequence: synthetic
gauuuccacuacgugacgg

SEQ ID NO: 616 - RNA, 19 nt, Artificial Sequence
  Description of Artificial Sequence: synthetic
gggccuugccuacuauucc

SEQ ID NO: 617 - RNA, 19 nt, Artificial Sequence
  Description of Artificial Sequence: synthetic
gccuugccuacuauuccau

SEQ ID NO: 618 - RNA, 19 nt, Artificial Sequence
  Description of Artificial Sequence: synthetic
gacuaggaagacuuccgag

SEQ ID NO: 619 - RNA, 19 nt, Artificial Sequence
  Description of Artificial Sequence: synthetic
gcgggggagacauauauca

SEQ ID NO: 620 - RNA, 19 nt, Artificial Sequence
  Description of Artificial Sequence: synthetic
cgagcggucgcaaccucgu

SEQ ID NO: 621 - RNA, 19 nt, Artificial Sequence
  Description of Artificial Sequence: synthetic
ggccuugccuacuauucca

SEQ ID NO: 622 - RNA, 19 nt, Artificial Sequence
  Description of Artificial Sequence: synthetic
auuuccacuacgugacggg

SEQ ID NO: 623 - RNA, 19 nt, Artificial Sequence
  Description of Artificial Sequence: synthetic
ggacgucaaguucccgggc

SEQ ID NO: 624 - RNA, 19 nt, Artificial Sequence
  Description of Artificial Sequence: synthetic
gagugcuaugacgcgggcu

SEQ ID NO: 625 - RNA, 19 nt, Artificial Sequence
  Description of Artificial Sequence: synthetic
gacgucaaguucccgggcg

SEQ ID NO: 626 - RNA, 19 nt, Artificial Sequence
  Description of Artificial Sequence: synthetic
ucagcgacgggucuugguc

SEQ ID NO: 627 - RNA, 19 nt, Artificial Sequence
  Description of Artificial Sequence: synthetic
ucaaguucccgggcggugg

SEQ ID NO: 628 - RNA, 19 nt, Artificial Sequence
  Description of Artificial Sequence: synthetic
ucaaggagaugaaggcgaa

SEQ ID NO: 629 - RNA, 19 nt, Artificial Sequence
  Description of Artificial Sequence: synthetic
ccuauccccaaggcucgcc

SEQ ID NO: 630 - RNA, 19 nt, Artificial Sequence
  Description of Artificial Sequence: synthetic
cuugaccuaccucagauca

SEQ ID NO: 631 - RNA, 19 nt, Artificial Sequence
  Description of Artificial Sequence: synthetic
uuuccacuacgugacgggc

SEQ ID NO: 632 - RNA, 19 nt, Artificial Sequence
  Description of Artificial Sequence: synthetic
agugcuaugacgcgggcug

SEQ ID NO: 633 - RNA, 19 nt, Artificial Sequence
  Description of Artificial Sequence: synthetic
acgucaaguucccgggcgg

SEQ ID NO: 634 - RNA, 19 nt, Artificial Sequence
  Description of Artificial Sequence: synthetic
ucuggagacaucgggccag

SEQ ID NO: 635 - RNA, 19 nt, Artificial Sequence
  Description of Artificial Sequence: synthetic
gggcgaagcacauguggaa

SEQ ID NO: 636 - RNA, 19 nt, Artificial Sequence
  Description of Artificial Sequence: synthetic
uugaccuaccucagaucau

SEQ ID NO: 637 - RNA, 19 nt, Artificial Sequence
  Description of Artificial Sequence: synthetic
ccaagcggagacggcugga

SEQ ID NO: 638 - RNA, 19 nt, Artificial Sequence
  Description of Artificial Sequence: synthetic
accaagcggagacggcugg

SEQ ID NO: 639 - RNA, 19 nt, Artificial Sequence
  Description of Artificial Sequence: synthetic
ggguggcuucaugccucag

SEQ ID NO: 640 - RNA, 19 nt, Artificial Sequence
  Description of Artificial Sequence: synthetic
gucaaguucccgggcggug

SEQ ID NO: 641 - RNA, 19 nt, Artificial Sequence
  Description of Artificial Sequence: synthetic
cucaaggagaugaaggcga

SEQ ID NO: 642 - RNA, 19 nt, Artificial Sequence
  Description of Artificial Sequence: synthetic
gaccaagcggagacggcug

SEQ ID NO: 643 - RNA, 19 nt, Artificial Sequence
  Description of Artificial Sequence: synthetic
uccaggucgggcucaacca

SEQ ID NO: 644 - RNA, 19 nt, Artificial Sequence
  Description of Artificial Sequence: synthetic
cucuuucucuaucuuccuc

SEQ ID NO: 645 - RNA, 19 nt, Artificial Sequence
  Description of Artificial Sequence: synthetic
gucuggagacaucgggcca

SEQ ID NO: 646 - RNA, 19 nt, Artificial Sequence
  Description of Artificial Sequence: synthetic
guugugacuuggcccccga

SEQ ID NO: 647 - RNA, 19 nt, Artificial Sequence
  Description of Artificial Sequence: synthetic
agaccuggcuccaguccaa

SEQ ID NO: 648 - RNA, 19 nt, Artificial Sequence
  Description of Artificial Sequence: synthetic
cuugccuacuauuccaugg

SEQ ID NO: 649 - RNA, 19 nt, Artificial Sequence
  Description of Artificial Sequence: synthetic
cccgguugcucuuucucua

SEQ ID NO: 650 - RNA, 19 nt, Artificial Sequence
  Description of Artificial Sequence: synthetic
cuuucucuaucuuccucuu

SEQ ID NO: 651 - RNA, 19 nt, Artificial Sequence
  Description of Artificial Sequence: synthetic
aggguggcuucaugccuca

SEQ ID NO: 652 - RNA, 19 nt, Artificial Sequence
  Description of Artificial Sequence: synthetic
aagaccuggcuccagucca

SEQ ID NO: 653 - RNA, 19 nt, Artificial Sequence
  Description of Artificial Sequence: synthetic
ccgguugcucuuucucuau

SEQ ID NO: 654 - RNA, 19 nt, Artificial Sequence
  Description of Artificial Sequence: synthetic
cgguugcucuuucucuauc

SEQ ID NO: 655 - RNA, 19 nt, Artificial Sequence
  Description of Artificial Sequence: synthetic
ugggggauuuccacuacgu

SEQ ID NO: 656 - RNA, 19 nt, Artificial Sequence
  Description of Artificial Sequence: synthetic
augucacgaacgacugcuc

SEQ ID NO: 657 - RNA, 19 nt, Artificial Sequence
  Description of Artificial Sequence: synthetic
ggccuaguuggggccccac

SEQ ID NO: 658 - RNA, 19 nt, Artificial Sequence
  Description of Artificial Sequence: synthetic
uggaccaagcggagacggc

SEQ ID NO: 659 - RNA, 19 nt, Artificial Sequence
  Description of Artificial Sequence: synthetic
uuccaggucgggcucaacc

SEQ ID NO: 660 - RNA, 19 nt, Artificial Sequence
  Description of Artificial Sequence: synthetic
agcgggucgaguuccuggu

SEQ ID NO: 661 - RNA, 19 nt, Artificial Sequence
  Description of Artificial Sequence: synthetic
caaggagaugaaggcgaag

SEQ ID NO: 662 - RNA, 19 nt, Artificial Sequence
  Description of Artificial Sequence: synthetic
caugucacgaacgacugcu

SEQ ID NO: 663 - RNA, 19 nt, Artificial Sequence
  Description of Artificial Sequence: synthetic
cagcgggucgaguuccugg

SEQ ID NO: 664 - RNA, 19 nt, Artificial Sequence
  Description of Artificial Sequence: synthetic
uuccacuacgugacgggca

SEQ ID NO: 665 - RNA, 19 nt, Artificial Sequence
  Description of Artificial Sequence: synthetic
uaggguggcuucaugccuc

SEQ ID NO: 666 - RNA, 19 nt, Artificial Sequence
  Description of Artificial Sequence: synthetic
uccaggacugcacgaugcu

SEQ ID NO: 667 - RNA, 19 nt, Artificial Sequence
  Description of Artificial Sequence: synthetic
uccacuacgugacgggcau

SEQ ID NO: 668 - RNA, 19 nt, Artificial Sequence
  Description of Artificial Sequence: synthetic
aauaggguggcuucaugcc

SEQ ID NO: 669 - RNA, 19 nt, Artificial Sequence
  Description of Artificial Sequence: synthetic
gucuucacggaggcuauga

SEQ ID NO: 670 - RNA, 19 nt, Artificial Sequence
  Description of Artificial Sequence: synthetic
auaggguggcuucaugccu

SEQ ID NO: 671 - RNA, 19 nt, Artificial Sequence
  Description of Artificial Sequence: synthetic
ucuucacggaggcuaugac

SEQ ID NO: 672 - RNA, 19 nt, Artificial Sequence
  Description of Artificial Sequence: synthetic
augccucaggaaacuuggg

SEQ ID NO: 673 - RNA, 19 nt, Artificial Sequence
  Description of Artificial Sequence: synthetic
accgggacgugcucaagga

SEQ ID NO: 674 - RNA, 19 nt, Artificial Sequence
  Description of Artificial Sequence: synthetic
ggggcugugcaguggauga

SEQ ID NO: 675 - RNA, 19 nt, Artificial Sequence
  Description of Artificial Sequence: synthetic
aagcuccaggacugcacga

SEQ ID NO: 676 - RNA, 19 nt, Artificial Sequence
  Description of Artificial Sequence: synthetic
gcuccaggacugcacgaug

SEQ ID NO: 677 - RNA, 19 nt, Artificial Sequence
  Description of Artificial Sequence: synthetic
uaccgggacgugcucaagg

SEQ ID NO: 678 - RNA, 19 nt, Artificial Sequence
  Description of Artificial Sequence: synthetic
gggcugugcaguggaugaa

SEQ ID NO: 679 - RNA, 19 nt, Artificial Sequence
  Description of Artificial Sequence: synthetic
cgucaaguucccgggcggu

SEQ ID NO: 680 - RNA, 19 nt, Artificial Sequence
  Description of Artificial Sequence: synthetic
ucaauaggguggcuucaug

SEQ ID NO: 681 - RNA, 19 nt, Artificial Sequence
  Description of Artificial Sequence: synthetic
agucuucacggaggcuaug

SEQ ID NO: 682 - RNA, 19 nt, Artificial Sequence
  Description of Artificial Sequence: synthetic
ggaccaagcggagacggcu

SEQ ID NO: 683 - RNA, 19 nt, Artificial Sequence
  Description of Artificial Sequence: synthetic
ggcuccaguccaagcuccu

SEQ ID NO: 684 - RNA, 19 nt, Artificial Sequence
  Description of Artificial Sequence: synthetic
ggcugugcaguggaugaac

SEQ ID NO: 685 - RNA, 19 nt, Artificial Sequence
  Description of Artificial Sequence: synthetic
cuccaggacugcacgaugc

SEQ ID NO: 686 - RNA, 19 nt, Artificial Sequence
  Description of Artificial Sequence: synthetic
gagucuucacggaggcuau

SEQ ID NO: 687 - RNA, 19 nt, Artificial Sequence
  Description of Artificial Sequence: synthetic
uggcuccaguccaagcucc

SEQ ID NO: 688 - RNA, 19 nt, Artificial Sequence
  Description of Artificial Sequence: synthetic
ggggauuuccacuacguga

SEQ ID NO: 689 - RNA, 19 nt, Artificial Sequence
  Description of Artificial Sequence: synthetic
caugccucaggaaacuugg

SEQ ID NO: 690 - RNA, 19 nt, Artificial Sequence
  Description of Artificial Sequence: synthetic
aucaauaggguggcuucau

SEQ ID NO: 691 - RNA, 19 nt, Artificial Sequence
  Description of Artificial Sequence: synthetic
gcgggccuugccuacuauu

SEQ ID NO: 692 - RNA, 19 nt, Artificial Sequence
  Description of Artificial Sequence: synthetic
ccgggacgugcucaaggag

SEQ ID NO: 693 - RNA, 19 nt, Artificial Sequence
  Description of Artificial Sequence: synthetic
ccaugguggggaacugggc

SEQ ID NO: 694 - RNA, 19 nt, Artificial Sequence
  Description of Artificial Sequence: synthetic
caauaggguggcuucaugc

SEQ ID NO: 695 - RNA, 19 nt, Artificial Sequence
  Description of Artificial Sequence: synthetic
agcuccaggacugcacgau

SEQ ID NO: 696 - RNA, 19 nt, Artificial Sequence
  Description of Artificial Sequence: synthetic
cgggccuugccuacuauuc

SEQ ID NO: 697 - RNA, 19 nt, Artificial Sequence
  Description of Artificial Sequence: synthetic
cuacgagaccucccggggc

SEQ ID NO: 698 - RNA, 19 nt, Artificial Sequence
  Description of Artificial Sequence: synthetic
ccuaucaggcaguaccaca

SEQ ID NO: 699 - RNA, 19 nt, Artificial Sequence
  Description of Artificial Sequence: synthetic
cuaucaggcaguaccacaa

SEQ ID NO: 700 - RNA, 19 nt, Artificial Sequence
  Description of Artificial Sequence: synthetic
ucuacgagaccucccgggg

SEQ ID NO: 701 - RNA, 19 nt, Artificial Sequence
  Description of Artificial Sequence: synthetic
cccuaucaggcaguaccac

SEQ ID NO: 702 - RNA, 19 nt, Artificial Sequence
  Description of Artificial Sequence: synthetic
caagcacccuaucaggcag

SEQ ID NO: 703 - RNA, 19 nt, Artificial Sequence
  Description of Artificial Sequence: synthetic
aucaggcaguaccacaagg

SEQ ID NO: 704 - RNA, 19 nt, Artificial Sequence
  Description of Artificial Sequence: synthetic
guaccacaaggccuuucgc

SEQ ID NO: 705 - RNA, 19 nt, Artificial Sequence
  Description of Artificial Sequence: synthetic
agcacccuaucaggcagua

SEQ ID NO: 706 - RNA, 19 nt, Artificial Sequence
  Description of Artificial Sequence: synthetic
cacccuaucaggcaguacc

SEQ ID NO: 707 - RNA, 19 nt, Artificial Sequence
  Description of Artificial Sequence: synthetic
gcaguaccacaaggccuuu

SEQ ID NO: 708 - RNA, 19 nt, Artificial Sequence
  Description of Artificial Sequence: synthetic
ggcaguaccacaaggccuu

SEQ ID NO: 709 - RNA, 19 nt, Artificial Sequence
  Description of Artificial Sequence: synthetic
uaucaggcaguaccacaag

SEQ ID NO: 710 - RNA, 19 nt, Artificial Sequence
  Description of Artificial Sequence: synthetic
aggcaguaccacaaggccu

SEQ ID NO: 711 - RNA, 19 nt, Artificial Sequence
  Description of Artificial Sequence: synthetic
gcacccuaucaggcaguac

SEQ ID NO: 712 - RNA, 19 nt, Artificial Sequence
  Description of Artificial Sequence: synthetic
aagcacccuaucaggcagu

SEQ ID NO: 713 - RNA, 19 nt, Artificial Sequence
  Description of Artificial Sequence: synthetic
cucccggggcacucgcaag

SEQ ID NO: 714 - RNA, 19 nt, Artificial Sequence
  Description of Artificial Sequence: synthetic
cucgcaagcacccuaucag

SEQ ID NO: 715 - RNA, 19 nt, Artificial Sequence
  Description of Artificial Sequence: synthetic
ccucccggggcacucgcaa

SEQ ID NO: 716 - RNA, 19 nt, Artificial Sequence
  Description of Artificial Sequence: synthetic
ucgcaagcacccuaucagg

SEQ ID NO: 717 - RNA, 19 nt, Artificial Sequence
  Description of Artificial Sequence: synthetic
caggcaguaccacaaggcc

SEQ ID NO: 718 - RNA, 19 nt, Artificial Sequence
  Description of Artificial Sequence: synthetic
ucccggggcacucgcaagc

SEQ ID NO: 719 - RNA, 19 nt, Artificial Sequence
  Description of Artificial Sequence: synthetic
gcaagcacccuaucaggca

SEQ ID NO: 720 - RNA, 19 nt, Artificial Sequence
  Description of Artificial Sequence: synthetic
caguaccacaaggccuuuc

SEQ ID NO: 721 - RNA, 19 nt, Artificial Sequence
  Description of Artificial Sequence: synthetic
cgcaagcacccuaucaggc

SEQ ID NO: 722 - RNA, 19 nt, Artificial Sequence
  Description of Artificial Sequence: synthetic
aguaccacaaggccuuucg

SEQ ID NO: 723 - RNA, 19 nt, Artificial Sequence
  Description of Artificial Sequence: synthetic
ucaggcaguaccacaaggc

SEQ ID NO: 724 - RNA, 19 nt, Artificial Sequence
  Description of Artificial Sequence: synthetic
gagaccucccggggcacuc

SEQ ID NO: 725 - RNA, 19 nt, Artificial Sequence
  Description of Artificial Sequence: synthetic
gucuacgagaccucccggg

SEQ ID NO: 726 - RNA, 19 nt, Artificial Sequence
  Description of Artificial Sequence: synthetic
accucccggggcacucgca

SEQ ID NO: 727 - RNA, 19 nt, Artificial Sequence
  Description of Artificial Sequence: synthetic
acccuaucaggcaguacca

SEQ ID NO: 728 - RNA, 19 nt, Artificial Sequence
  Description of Artificial Sequence: synthetic
auuccgguguacucaccgg

SEQ ID NO: 729 - RNA, 19 nt, Artificial Sequence
  Description of Artificial Sequence: synthetic
gaccucccggggcacucgc

SEQ ID NO: 730 - RNA, 19 nt, Artificial Sequence
  Description of Artificial Sequence: synthetic
agaccucccggggcacucg

SEQ ID NO: 731 - RNA, 19 nt, Artificial Sequence
  Description of Artificial Sequence: synthetic
uacgagaccucccggggca

SEQ ID NO: 732 - RNA, 19 nt, Artificial Sequence
  Description of Artificial Sequence: synthetic
acgagaccucccggggcac

SEQ ID NO: 733 - RNA, 19 nt, Artificial Sequence
  Description of Artificial Sequence: synthetic
cgagaccucccggggcacu

SEQ ID NO: 734 - RNA, 19 nt, Artificial Sequence
  Description of Artificial Sequence: synthetic
ggucuacgagaccucccgg

SEQ ID NO: 735 - RNA, 19 nt, Artificial Sequence
  Description of Artificial Sequence: synthetic
acucgcaagcacccuauca

SEQ ID NO: 736 - RNA, 19 nt, Artificial Sequence
  Description of Artificial Sequence: synthetic
ccggggcacucgcaagcac

SEQ ID NO: 737 - RNA, 19 nt, Artificial Sequence
  Description of Artificial Sequence: synthetic
gcacucgcaagcacccuau

SEQ ID NO: 738 - RNA, 19 nt, Artificial Sequence
  Description of Artificial Sequence: synthetic
ggggcacucgcaagcaccc

SEQ ID NO: 739 - RNA, 19 nt, Artificial Sequence
  Description of Artificial Sequence: synthetic
cggucuacgagaccucccg

SEQ ID NO: 740 - RNA, 19 nt, Artificial Sequence
  Description of Artificial Sequence: synthetic
acggucuacgagaccuccc

SEQ ID NO: 741 - RNA, 19 nt, Artificial Sequence
  Description of Artificial Sequence: synthetic
cacucgcaagcacccuauc

SEQ ID NO: 742 - RNA, 19 nt, Artificial Sequence
  Description of Artificial Sequence: synthetic
cacggucuacgagaccucc

SEQ ID NO: 743 - RNA, 19 nt, Artificial Sequence
  Description of Artificial Sequence: synthetic
gggcacucgcaagcacccu

SEQ ID NO: 744 - RNA, 19 nt, Artificial Sequence
  Description of Artificial Sequence: synthetic
cccggggcacucgcaagca

SEQ ID NO: 745 - RNA, 19 nt, Artificial Sequence
  Description of Artificial Sequence: synthetic
cggggcacucgcaagcacc

SEQ ID NO: 746 - RNA, 19 nt, Artificial Sequence
  Description of Artificial Sequence: synthetic
ggcacucgcaagcacccua

SEQ ID NO: 747 - RNA, 19 nt, Artificial Sequence
  Description of Artificial Sequence: synthetic
ugcacggucuacgagaccu

SEQ ID NO: 748 - RNA, 19 nt, Artificial Sequence
  Description of Artificial Sequence: synthetic
gcacggucuacgagaccuc

SEQ ID NO: 749 - RNA, 19 nt, Artificial Sequence
  Description of Artificial Sequence: synthetic
cgguguacucaccgguucc

SEQ ID NO: 750 - RNA, 19 nt, Artificial Sequence
  Description of Artificial Sequence: synthetic
gguguacucaccgguuccg

SEQ ID NO: 751 - RNA, 19 nt, Artificial Sequence
  Description of Artificial Sequence: synthetic
aauuccgguguacucaccg

SEQ ID NO: 752 - RNA, 19 nt, Artificial Sequence
  Description of Artificial Sequence: synthetic
guguacucaccgguuccgc

SEQ ID NO: 753 - RNA, 19 nt, Artificial Sequence
  Description of Artificial Sequence: synthetic
uccgguguacucaccgguu

SEQ ID NO: 754 - RNA, 19 nt, Artificial Sequence
  Description of Artificial Sequence: synthetic
uuccgguguacucaccggu

SEQ ID NO: 755 - RNA, 19 nt, Artificial Sequence
  Description of Artificial Sequence: synthetic
guacucaccgguuccgcag

SEQ ID NO: 756 - RNA, 19 nt, Artificial Sequence
  Description of Artificial Sequence: synthetic
acucaccgguuccgcagac

SEQ ID NO: 757 - RNA, 19 nt, Artificial Sequence
  Description of Artificial Sequence: synthetic
ccgguguacucaccgguuc

SEQ ID NO: 758 - RNA, 19 nt, Artificial Sequence
  Description of Artificial Sequence: synthetic
uguacucaccgguuccgca

SEQ ID NO: 759 - RNA, 19 nt, Artificial Sequence
  Description of Artificial Sequence: synthetic
uacucaccgguuccgcaga

SEQ ID NO: 760 - RNA, 19 nt, Artificial Sequence
  Description of Artificial Sequence: synthetic
agaccacuauggcucuccc

SEQ ID NO: 761 - RNA, 19 nt, Artificial Sequence
  Description of Artificial Sequence: synthetic
caccgguuccgcagaccac

SEQ ID NO: 762 - RNA, 19 nt, Artificial Sequence
  Description of Artificial Sequence: synthetic
cucaccgguuccgcagacc

SEQ ID NO: 763 - RNA, 19 nt, Artificial Sequence
  Description of Artificial Sequence: synthetic
gaccacuauggcucucccg

SEQ ID NO: 764 - RNA, 19 nt, Artificial Sequence
  Description of Artificial Sequence: synthetic
accacuauggcucucccgg

SEQ ID NO: 765 - RNA, 19 nt, Artificial Sequence
  Description of Artificial Sequence: synthetic
ucaccgguuccgcagacca

SEQ ID NO: 766 - RNA, 19 nt, Artificial Sequence
  Description of Artificial Sequence: synthetic
gcaauuccgguguacucac

SEQ ID NO: 767 - RNA, 19 nt, Artificial Sequence
  Description of Artificial Sequence: synthetic
ggcaauuccgguguacuca

SEQ ID NO: 768 - RNA, 19 nt, Artificial Sequence
  Description of Artificial Sequence: synthetic
caauuccgguguacucacc

SEQ ID NO: 769 - RNA, 19 nt, Artificial Sequence
  Description of Artificial Sequence: synthetic
ccgcagaccacuauggcuc

SEQ ID NO: 770 - RNA, 19 nt, Artificial Sequence
  Description of Artificial Sequence: synthetic
cgcagaccacuauggcucu

SEQ ID NO: 771 - RNA, 19 nt, Artificial Sequence
  Description of Artificial Sequence: synthetic
ccgguuccgcagaccacua

SEQ ID NO: 772 - RNA, 19 nt, Artificial Sequence
  Description of Artificial Sequence: synthetic
cgguuccgcagaccacuau

SEQ ID NO: 773 - RNA, 19 nt, Artificial Sequence
  Description of Artificial Sequence: synthetic
gcagaccacuauggcucuc

SEQ ID NO: 774 - RNA, 19 nt, Artificial Sequence
  Description of Artificial Sequence: synthetic
uuccgcagaccacuauggc

SEQ ID NO: 775 - RNA, 19 nt, Artificial Sequence
  Description of Artificial Sequence: synthetic
accgguuccgcagaccacu

SEQ ID NO: 776 - RNA, 19 nt, Artificial Sequence
  Description of Artificial Sequence: synthetic
gguuccgcagaccacuaug

SEQ ID NO: 777 - RNA, 19 nt, Artificial Sequence
  Description of Artificial Sequence: synthetic
uccgcagaccacuauggcu

SEQ ID NO: 778 - RNA, 19 nt, Artificial Sequence
  Description of Artificial Sequence: synthetic
guuccgcagaccacuaugg

SEQ ID NO: 779 - RNA, 19 nt, Artificial Sequence
  Description of Artificial Sequence: synthetic
auggcucucccgggagggg

SEQ ID NO: 780 - RNA, 19 nt, Artificial Sequence
  Description of Artificial Sequence: synthetic
cagaccacuauggcucucc

SEQ ID NO: 781 - RNA, 19 nt, Artificial Sequence
  Description of Artificial Sequence: synthetic
ccacuauggcucucccggg

SEQ ID NO: 782 - RNA, 19 nt, Artificial Sequence
  Description of Artificial Sequence: synthetic
uggcucucccgggaggggg

SEQ ID NO: 783 - RNA, 19 nt, Artificial Sequence
  Description of Artificial Sequence: synthetic
cacuauggcucucccggga

SEQ ID NO: 784 - RNA, 19 nt, Artificial Sequence
  Description of Artificial Sequence: synthetic
ggcucucccgggagggggg

SEQ ID NO: 785 - RNA, 19 nt, Artificial Sequence
  Description of Artificial Sequence: synthetic
uauggcucucccgggaggg

SEQ ID NO: 786 - RNA, 19 nt, Artificial Sequence
  Description of Artificial Sequence: synthetic
cuauggcucucccgggagg

SEQ ID NO: 787 - RNA, 19 nt, Artificial Sequence
  Description of Artificial Sequence: synthetic
acuauggcucucccgggag

SEQ ID NO: 788 - RNA, 19 nt, Artificial Sequence
  Description of Artificial Sequence: synthetic
gggccccugcgcggcaaca

SEQ ID NO: 789 - RNA, 19 nt, Artificial Sequence
  Description of Artificial Sequence: synthetic
gcucucccgggaggggggg

SEQ ID NO: 790 - RNA, 19 nt, Artificial Sequence
  Description of Artificial Sequence: synthetic
cacucauacuaacgccaug

SEQ ID NO: 791 - RNA, 19 nt, Artificial Sequence
  Description of Artificial Sequence: synthetic
cauacuaacgccauggcua

SEQ ID NO: 792 - RNA, 19 nt, Artificial Sequence
  Description of Artificial Sequence: synthetic
ucauacuaacgccauggcu

SEQ ID NO: 793 - RNA, 19 nt, Artificial Sequence
  Description of Artificial Sequence: synthetic
acucauacuaacgccaugg

SEQ ID NO: 794 - RNA, 19 nt, Artificial Sequence
  Description of Artificial Sequence: synthetic
acacucauacuaacgccau

SEQ ID NO: 795 - RNA, 19 nt, Artificial Sequence
  Description of Artificial Sequence: synthetic
acgccauggcuagacgcuu

SEQ ID NO: 796 - RNA, 19 nt, Artificial Sequence
  Description of Artificial Sequence: synthetic
acuaacgccauggcuagac

SEQ ID NO: 797 - RNA, 19 nt, Artificial Sequence
  Description of Artificial Sequence: synthetic
cgccauggcuagacgcuuu

SEQ ID NO: 798 - RNA, 19 nt, Artificial Sequence
  Description of Artificial Sequence: synthetic
uaacgccauggcuagacgc

SEQ ID NO: 799 - RNA, 19 nt, Artificial Sequence
  Description of Artificial Sequence: synthetic
cucauacuaacgccauggc

SEQ ID NO: 800 - RNA, 19 nt, Artificial Sequence
  Description of Artificial Sequence: synthetic
aacgccauggcuagacgcu

SEQ ID NO: 801 - RNA, 19 nt, Artificial Sequence
  Description of Artificial Sequence: synthetic
cuaacgccauggcuagacg

SEQ ID NO: 802 - RNA, 19 nt, Artificial Sequence
  Description of Artificial Sequence: synthetic
uacuaacgccauggcuaga

SEQ ID NO: 803 - RNA, 19 nt, Artificial Sequence
  Description of Artificial Sequence: synthetic
gccauggcuagacgcuuuc

SEQ ID NO: 804 - RNA, 19 nt, Artificial Sequence
  Description of Artificial Sequence: synthetic
auacuaacgccauggcuag

SEQ ID NO: 805 - RNA, 19 nt, Artificial Sequence
  Description of Artificial Sequence: synthetic
aguuccucacaggggagug

SEQ ID NO: 806 - RNA, 19 nt, Artificial Sequence
  Description of Artificial Sequence: synthetic
uuugguuuuucuuugaggu

SEQ ID NO: 807 - RNA, 19 nt, Artificial Sequence
  Description of Artificial Sequence: synthetic
uggcuagacgcuuucugcg

SEQ ID NO: 808 - RNA, 19 nt, Artificial Sequence
  Description of Artificial Sequence: synthetic
gguaucgaugaccuuaccc

SEQ ID NO: 809 - RNA, 19 nt, Artificial Sequence
  Description of Artificial Sequence: synthetic
cauggcuagacgcuuucug

SEQ ID NO: 810 - RNA, 19 nt, Artificial Sequence
  Description of Artificial Sequence: synthetic
ugguuuuucuuugagguuu

SEQ ID NO: 811 - RNA, 19 nt, Artificial Sequence
  Description of Artificial Sequence: synthetic
auggcuagacgcuuucugc

SEQ ID NO: 812 - RNA, 19 nt, Artificial Sequence
  Description of Artificial Sequence: synthetic
ccauggcuagacgcuuucu

SEQ ID NO: 813 - RNA, 19 nt, Artificial Sequence
  Description of Artificial Sequence: synthetic
ggcuagacgcuuucugcgu

SEQ ID NO: 814 - RNA, 19 nt, Artificial Sequence
  Description of Artificial Sequence: synthetic
uugguuuuucuuugagguu

SEQ ID NO: 815 - RNA, 19 nt, Artificial Sequence
  Description of Artificial Sequence: synthetic
guaucgaugaccuuaccca

SEQ ID NO: 816 - RNA, 19 nt, Artificial Sequence
  Description of Artificial Sequence: synthetic
aggguaucgaugaccuuac

SEQ ID NO: 817 - RNA, 19 nt, Artificial Sequence
  Description of Artificial Sequence: synthetic
uagacgcuuucugcgugaa

SEQ ID NO: 818 - RNA, 19 nt, Artificial Sequence
  Description of Artificial Sequence: synthetic
ggguaucgaugaccuuacc

SEQ ID NO: 819 - RNA, 19 nt, Artificial Sequence
  Description of Artificial Sequence: synthetic
uuccucacaggggagugau

SEQ ID NO: 820 - RNA, 19 nt, Artificial Sequence
  Description of Artificial Sequence: synthetic
guuccucacaggggaguga

SEQ ID NO: 821 - RNA, 19 nt, Artificial Sequence
  Description of Artificial Sequence: synthetic
cgcuuucugcgugaagaca

SEQ ID NO: 822 - RNA, 19 nt, Artificial Sequence
  Description of Artificial Sequence: synthetic
cuagacgcuuucugcguga

SEQ ID NO: 823 - RNA, 19 nt, Artificial Sequence
  Description of Artificial Sequence: synthetic
gcuagacgcuuucugcgug

SEQ ID NO: 824 - RNA, 19 nt, Artificial Sequence
  Description of Artificial Sequence: synthetic
uccaagaaaggacccgguc

SEQ ID NO: 825 - RNA, 19 nt, Artificial Sequence
  Description of Artificial Sequence: synthetic
gugaagacaguaguuccuc

SEQ ID NO: 826 - RNA, 19 nt, Artificial Sequence
  Description of Artificial Sequence: synthetic
agacaguaguuccucacag

SEQ ID NO: 827 - RNA, 19 nt, Artificial Sequence
  Description of Artificial Sequence: synthetic
gcgugaagacaguaguucc

SEQ ID NO: 828 - RNA, 19 nt, Artificial Sequence
  Description of Artificial Sequence: synthetic
uaguuccucacaggggagu

SEQ ID NO: 829 - RNA, 19 nt, Artificial Sequence
  Description of Artificial Sequence: synthetic
acgcuuucugcgugaagac

SEQ ID NO: 830 - RNA, 19 nt, Artificial Sequence
  Description of Artificial Sequence: synthetic
cgugaagacaguaguuccu

SEQ ID NO: 831 - RNA, 19 nt, Artificial Sequence
  Description of Artificial Sequence: synthetic
gacaguaguuccucacagg

SEQ ID NO: 832 - RNA, 19 nt, Artificial Sequence
  Description of Artificial Sequence: synthetic
aagacaguaguuccucaca

SEQ ID NO: 833 - RNA, 19 nt, Artificial Sequence
  Description of Artificial Sequence: synthetic
gacgcuuucugcgugaaga

SEQ ID NO: 834 - RNA, 19 nt, Artificial Sequence
  Description of Artificial Sequence: synthetic
ugcgugaagacaguaguuc

SEQ ID NO: 835 - RNA, 19 nt, Artificial Sequence
  Description of Artificial Sequence: synthetic
acaguaguuccucacaggg

SEQ ID NO: 836 - RNA, 19 nt, Artificial Sequence
  Description of Artificial Sequence: synthetic
agacgcuuucugcgugaag

SEQ ID NO: 837 - RNA, 19 nt, Artificial Sequence
  Description of Artificial Sequence: synthetic
ugaagacaguaguuccuca

SEQ ID NO: 838 - RNA, 19 nt, Artificial Sequence
  Description of Artificial Sequence: synthetic
gacacucauacuaacgcca

SEQ ID NO: 839 - RNA, 19 nt, Artificial Sequence
  Description of Artificial Sequence: synthetic
caguaguuccucacagggg

SEQ ID NO: 840 - RNA, 19 nt, Artificial Sequence
  Description of Artificial Sequence: synthetic
gaagacaguaguuccucac

SEQ ID NO: 841 - RNA, 19 nt, Artificial Sequence
  Description of Artificial Sequence: synthetic
cgacacucauacuaacgcc

SEQ ID NO: 842 - RNA, 19 nt, Artificial Sequence
  Description of Artificial Sequence: synthetic
cgacccaacacuacucggc

SEQ ID NO: 843 - RNA, 19 nt, Artificial Sequence
  Description of Artificial Sequence: synthetic
cuuucugcgugaagacagu

SEQ ID NO: 844 - RNA, 19 nt, Artificial Sequence
  Description of Artificial Sequence: synthetic
caaggccuuucgcgaccca

SEQ ID NO: 845 - RNA, 19 nt, Artificial Sequence
  Description of Artificial Sequence: synthetic
uucugcgugaagacaguag

SEQ ID NO: 846 - RNA, 19 nt, Artificial Sequence
  Description of Artificial Sequence: synthetic
cgcgacccaacacuacucg

SEQ ID NO: 847 - RNA, 19 nt, Artificial Sequence
  Description of Artificial Sequence: synthetic
uuucgcgacccaacacuac

SEQ ID NO: 848 - RNA, 19 nt, Artificial Sequence
  Description of Artificial Sequence: synthetic
gguuuuucuuugagguuua

SEQ ID NO: 849 - RNA, 19 nt, Artificial Sequence
  Description of Artificial Sequence: synthetic
gcgacccaacacuacucgg

SEQ ID NO: 850 - RNA, 19 nt, Artificial Sequence
  Description of Artificial Sequence: synthetic
gacccaacacuacucggcu

SEQ ID NO: 851 - RNA, 19 nt, Artificial Sequence
  Description of Artificial Sequence: synthetic
ccacaaggccuuucgcgac

SEQ ID NO: 852 - RNA, 19 nt, Artificial Sequence
  Description of Artificial Sequence: synthetic
cuuucgcgacccaacacua

SEQ ID NO: 853 - RNA, 19 nt, Artificial Sequence
  Description of Artificial Sequence: synthetic
cccaacacuacucggcuag

SEQ ID NO: 854 - RNA, 19 nt, Artificial Sequence
  Description of Artificial Sequence: synthetic
ucgcgacccaacacuacuc

SEQ ID NO: 855 - RNA, 19 nt, Artificial Sequence
  Description of Artificial Sequence: synthetic
accacaaggccuuucgcga

SEQ ID NO: 856 - RNA, 19 nt, Artificial Sequence
  Description of Artificial Sequence: synthetic
acgacacucauacuaacgc

SEQ ID NO: 857 - RNA, 19 nt, Artificial Sequence
  Description of Artificial Sequence: synthetic
acccaacacuacucggcua

SEQ ID NO: 858 - RNA, 19 nt, Artificial Sequence
  Description of Artificial Sequence: synthetic
cugcgugaagacaguaguu

SEQ ID NO: 859 - RNA, 19 nt, Artificial Sequence
  Description of Artificial Sequence: synthetic
uaccacaaggccuuucgcg

SEQ ID NO: 860 - RNA, 19 nt, Artificial Sequence
  Description of Artificial Sequence: synthetic
ccuuucgcgacccaacacu

SEQ ID NO: 861 - RNA, 19 nt, Artificial Sequence
  Description of Artificial Sequence: synthetic
aggccuuucgcgacccaac

SEQ ID NO: 862 - RNA, 19 nt, Artificial Sequence
  Description of Artificial Sequence: synthetic
uucgcgacccaacacuacu

SEQ ID NO: 863 - RNA, 19 nt, Artificial Sequence
  Description of Artificial Sequence: synthetic
aaggccuuucgcgacccaa

SEQ ID NO: 864 - RNA, 19 nt, Artificial Sequence
  Description of Artificial Sequence: synthetic
aguaguuccucacagggga

SEQ ID NO: 865 - RNA, 19 nt, Artificial Sequence
  Description of Artificial Sequence: synthetic
uuucugcgugaagacagua

SEQ ID NO: 866 - RNA, 19 nt, Artificial Sequence
  Description of Artificial Sequence: synthetic
gccuuucgcgacccaacac

SEQ ID NO: 867 - RNA, 19 nt, Artificial Sequence
  Description of Artificial Sequence: synthetic
ucugcgugaagacaguagu

SEQ ID NO: 868 - RNA, 19 nt, Artificial Sequence
  Description of Artificial Sequence: synthetic
gcuuucugcgugaagacag

SEQ ID NO: 869 - RNA, 19 nt, Artificial Sequence
  Description of Artificial Sequence: synthetic
acaaggccuuucgcgaccc

SEQ ID NO: 870 - RNA, 19 nt, Artificial Sequence
  Description of Artificial Sequence: synthetic
uuuuucuuugagguuuagg

SEQ ID NO: 871 - RNA, 19 nt, Artificial Sequence
  Description of Artificial Sequence: synthetic
cacaaggccuuucgcgacc

SEQ ID NO: 872 - RNA, 19 nt, Artificial Sequence
  Description of Artificial Sequence: synthetic
guuuuucuuugagguuuag

SEQ ID NO: 873 - RNA, 19 nt, Artificial Sequence
  Description of Artificial Sequence: synthetic
ggccuuucgcgacccaaca

SEQ ID NO: 874 - RNA, 19 nt, Artificial Sequence
  Description of Artificial Sequence: synthetic
guaguuccucacaggggag

SEQ ID NO: 875 - RNA, 19 nt, Artificial Sequence
  Description of Artificial Sequence: synthetic
uuuucuuugagguuuagga

SEQ ID NO: 876 - RNA, 19 nt, Artificial Sequence
  Description of Artificial Sequence: synthetic
auccaagaaaggacccggu

SEQ ID NO: 877 - RNA, 19 nt, Artificial Sequence
  Description of Artificial Sequence: synthetic
uucuuugagguuuaggauu

SEQ ID NO: 878 - RNA, 19 nt, Artificial Sequence
  Description of Artificial Sequence: synthetic
ccaaaucuccaggcauuga

SEQ ID NO: 879 - RNA, 19 nt, Artificial Sequence
  Description of Artificial Sequence: synthetic
cgcccaaaucuccaggcau

SEQ ID NO: 880 - RNA, 19 nt, Artificial Sequence
  Description of Artificial Sequence: synthetic
gcccaaaucuccaggcauu

SEQ ID NO: 881 - RNA, 19 nt, Artificial Sequence
  Description of Artificial Sequence: synthetic
auguaccccaugaggucgg

SEQ ID NO: 882 - RNA, 19 nt, Artificial Sequence
  Description of Artificial Sequence: synthetic
aaaucuccaggcauugagc

SEQ ID NO: 883 - RNA, 19 nt, Artificial Sequence
  Description of Artificial Sequence: synthetic
caaaucuccaggcauugag

SEQ ID NO: 884 - RNA, 19 nt, Artificial Sequence
  Description of Artificial Sequence: synthetic
ccaacacuacucggcuagc

SEQ ID NO: 885 - RNA, 19 nt, Artificial Sequence
  Description of Artificial Sequence: synthetic
aaucuccaggcauugagcg

SEQ ID NO: 886 - RNA, 19 nt, Artificial Sequence
  Description of Artificial Sequence: synthetic
cccaaaucuccaggcauug

SEQ ID NO: 887 - RNA, 19 nt, Artificial Sequence
  Description of Artificial Sequence: synthetic
uguaccccaugaggucggc

SEQ ID NO: 888 - RNA, 19 nt, Artificial Sequence
  Description of Artificial Sequence: synthetic
uuucuuugagguuuaggau

SEQ ID NO: 889 - RNA, 19 nt, Artificial Sequence
  Description of Artificial Sequence: synthetic
cgggggcacgcccaaaucu

SEQ ID NO: 890 - RNA, 19 nt, Artificial Sequence
  Description of Artificial Sequence: synthetic
ucuccaggcauugagcggg

SEQ ID NO: 891 - RNA, 19 nt, Artificial Sequence
  Description of Artificial Sequence: synthetic
gggggcacgcccaaaucuc

SEQ ID NO: 892 - RNA, 19 nt, Artificial Sequence
  Description of Artificial Sequence: synthetic
ggggcacgcccaaaucucc

SEQ ID NO: 893 - RNA, 19 nt, Artificial Sequence
  Description of Artificial Sequence: synthetic
gcgggggcacgcccaaauc

SEQ ID NO: 894 - RNA, 19 nt, Artificial Sequence
  Description of Artificial Sequence: synthetic
aucuccaggcauugagcgg

SEQ ID NO: 895 - RNA, 19 nt, Artificial Sequence
  Description of Artificial Sequence: synthetic
cuggcaauuccgguguacu

SEQ ID NO: 896 - RNA, 19 nt, Artificial Sequence
  Description of Artificial Sequence: synthetic
uccuggcaauuccggugua

SEQ ID NO: 897 - RNA, 19 nt, Artificial Sequence
  Description of Artificial Sequence: synthetic
uggcaauuccgguguacuc

SEQ ID NO: 898 - RNA, 19 nt, Artificial Sequence
  Description of Artificial Sequence: synthetic
ccuggcaauuccgguguac

SEQ ID NO: 899 - RNA, 19 nt, Artificial Sequence
  Description of Artificial Sequence: synthetic
uggggccccugcgcggcaa

SEQ ID NO: 900 - RNA, 19 nt, Artificial Sequence
  Description of Artificial Sequence: synthetic
ggcacgcccaaaucuccag

SEQ ID NO: 901 - RNA, 19 nt, Artificial Sequence
  Description of Artificial Sequence: synthetic
ggggccccugcgcggcaac

SEQ ID NO: 902 - RNA, 19 nt, Artificial Sequence
  Description of Artificial Sequence: synthetic
cacgcccaaaucuccaggc

SEQ ID NO: 903 - RNA, 19 nt, Artificial Sequence
  Description of Artificial Sequence: synthetic
gggcacgcccaaaucucca

SEQ ID NO: 904 - RNA, 19 nt, Artificial Sequence
  Description of Artificial Sequence: synthetic
gcacgcccaaaucuccagg

SEQ ID NO: 905 - RNA, 19 nt, Artificial Sequence
  Description of Artificial Sequence: synthetic
caacacuacucggcuagca

SEQ ID NO: 906 - RNA, 19 nt, Artificial Sequence
  Description of Artificial Sequence: synthetic
acgcccaaaucuccaggca

SEQ ID NO: 907 - RNA, 19 nt, Artificial Sequence
  Description of Artificial Sequence: synthetic
aacacuacucggcuagcag

SEQ ID NO: 908 - RNA, 19 nt, Artificial Sequence
  Description of Artificial Sequence: synthetic
acacuacucggcuagcagu

SEQ ID NO: 909 - RNA, 19 nt, Artificial Sequence
  Description of Artificial Sequence: synthetic
cacuacucggcuagcaguc

SEQ ID NO: 910 - RNA, 19 nt, Artificial Sequence
  Description of Artificial Sequence: synthetic
acuacucggcuagcagucu

SEQ ID NO: 911 - RNA, 19 nt, Artificial Sequence
  Description of Artificial Sequence: synthetic
cuccaggcauugagcgggu

SEQ ID NO: 912 - RNA, 19 nt, Artificial Sequence
  Description of Artificial Sequence: synthetic
uccaggcauugagcggguu

SEQ ID NO: 913 - RNA, 19 nt, Artificial Sequence
  Description of Artificial Sequence: synthetic
cuggggccccugcgcggca

SEQ ID NO: 914 - RNA, 19 nt, Artificial Sequence
  Description of Artificial Sequence: synthetic
cacccaaccuggggccccu

SEQ ID NO: 915 - RNA, 19 nt, Artificial Sequence
  Description of Artificial Sequence: synthetic
cacacccaaccuggggccc

SEQ ID NO: 916 - RNA, 19 nt, Artificial Sequence
  Description of Artificial Sequence: synthetic
acccaaccuggggccccug

SEQ ID NO: 917 - RNA, 19 nt, Artificial Sequence
  Description of Artificial Sequence: synthetic
gcacacccaaccuggggcc

SEQ ID NO: 918 - RNA, 19 nt, Artificial Sequence
  Description of Artificial Sequence: synthetic
ccaaccuggggccccugcg

SEQ ID NO: 919 - RNA, 19 nt, Artificial Sequence
  Description of Artificial Sequence: synthetic
acaggagccauccugccca

SEQ ID NO: 920 - RNA, 19 nt, Artificial Sequence
  Description of Artificial Sequence: synthetic
cgcacacccaaccuggggc

SEQ ID NO: 921 - RNA, 19 nt, Artificial Sequence
  Description of Artificial Sequence: synthetic
cccaaccuggggccccugc

SEQ ID NO: 922 - RNA, 19 nt, Artificial Sequence
  Description of Artificial Sequence: synthetic
gacaggagccauccugccc

SEQ ID NO: 923 - RNA, 19 nt, Artificial Sequence
  Description of Artificial Sequence: synthetic
acacccaaccuggggcccc

SEQ ID NO: 924 - RNA, 19 nt, Artificial Sequence
  Description of Artificial Sequence: synthetic
ccuggggccccugcgcggc

SEQ ID NO: 925 - RNA, 19 nt, Artificial Sequence
  Description of Artificial Sequence: synthetic
caaccuggggccccugcgc

SEQ ID NO: 926 - RNA, 19 nt, Artificial Sequence
  Description of Artificial Sequence: synthetic
aaccuggggccccugcgcg

SEQ ID NO: 927 - RNA, 19 nt, Artificial Sequence
  Description of Artificial Sequence: synthetic
accuggggccccugcgcgg

SEQ ID NO: 928 - RNA, 19 nt, Artificial Sequence
  Description of Artificial Sequence: synthetic
gaaaggacccggucguccu

SEQ ID NO: 929 - RNA, 19 nt, Artificial Sequence
  Description of Artificial Sequence: synthetic
aaaggacccggucguccug

SEQ ID NO: 930 - RNA, 19 nt, Artificial Sequence
  Description of Artificial Sequence: synthetic
ggacccggucguccuggca

SEQ ID NO: 931 - RNA, 19 nt, Artificial Sequence
  Description of Artificial Sequence: synthetic
acccggucguccuggcaau

SEQ ID NO: 932 - RNA, 19 nt, Artificial Sequence
  Description of Artificial Sequence: synthetic
cccggucguccuggcaauu

SEQ ID NO: 933 - RNA, 19 nt, Artificial Sequence
  Description of Artificial Sequence: synthetic
gacccggucguccuggcaa

SEQ ID NO: 934 - RNA, 19 nt, Artificial Sequence
  Description of Artificial Sequence: synthetic
aaggacccggucguccugg

SEQ ID NO: 935 - RNA, 19 nt, Artificial Sequence
  Description of Artificial Sequence: synthetic
aggacccggucguccuggc

SEQ ID NO: 936 - RNA, 19 nt, Artificial Sequence
  Description of Artificial Sequence: synthetic
ccggucguccuggcaauuc

SEQ ID NO: 937 - RNA, 19 nt, Artificial Sequence
  Description of Artificial Sequence: synthetic
caagaaaggacccggucgu

SEQ ID NO: 938 - RNA, 19 nt, Artificial Sequence
  Description of Artificial Sequence: synthetic
aagaaaggacccggucguc

SEQ ID NO: 939 - RNA, 19 nt, Artificial Sequence
  Description of Artificial Sequence: synthetic
ccaagaaaggacccggucg

SEQ ID NO: 940 - RNA, 19 nt, Artificial Sequence
  Description of Artificial Sequence: synthetic
agaaaggacccggucgucc

SEQ ID NO: 941 - RNA, 19 nt, Artificial Sequence
  Description of Artificial Sequence: synthetic
gucguccuggcaauuccgg

SEQ ID NO: 942 - RNA, 19 nt, Artificial Sequence
  Description of Artificial Sequence: synthetic
guccuggcaauuccggugu

SEQ ID NO: 943 - RNA, 19 nt, Artificial Sequence
  Description of Artificial Sequence: synthetic
ucguccuggcaauuccggu

SEQ ID NO: 944 - RNA, 19 nt, Artificial Sequence
  Description of Artificial Sequence: synthetic
ggucguccuggcaauuccg

SEQ ID NO: 945 - RNA, 19 nt, Artificial Sequence
  Description of Artificial Sequence: synthetic
cggucguccuggcaauucc

SEQ ID NO: 946 - RNA, 19 nt, Artificial Sequence
  Description of Artificial Sequence: synthetic
cguccuggcaauuccggug

SEQ ID NO: 947 - RNA, 19 nt, Artificial Sequence
  Description of Artificial Sequence: synthetic
gcgcacacccaaccugggg

SEQ ID NO: 948 - RNA, 19 nt, Artificial Sequence
  Description of Artificial Sequence: synthetic
guaaacuccaccaacgauc

SEQ ID NO: 949 - RNA, 19 nt, Artificial Sequence
  Description of Artificial Sequence: synthetic
aaacuccaccaacgaucug

SEQ ID NO: 950 - RNA, 19 nt, Artificial Sequence
  Description of Artificial Sequence: synthetic
uaaacuccaccaacgaucu

SEQ ID NO: 951 - RNA, 19 nt, Artificial Sequence
  Description of Artificial Sequence: synthetic
cgcgcacacccaaccuggg

SEQ ID NO: 952 - RNA, 19 nt, Artificial Sequence
  Description of Artificial Sequence: synthetic
gcgcgcacacccaaccugg

SEQ ID NO: 953 - RNA, 19 nt, Artificial Sequence
  Description of Artificial Sequence: synthetic
ucgcgcgcacacccaaccu

SEQ ID NO: 954 - RNA, 19 nt, Artificial Sequence
  Description of Artificial Sequence: synthetic
cgcgcgcacacccaaccug

SEQ ID NO: 955 - RNA, 19 nt, Artificial Sequence
  Description of Artificial Sequence: synthetic
gucgcgcgcacacccaacc

SEQ ID NO: 956 - RNA, 19 nt, Artificial Sequence
  Description of Artificial Sequence: synthetic
guguuacguuugguuuuuc

SEQ ID NO: 957 - RNA, 19 nt, Artificial Sequence
  Description of Artificial Sequence: synthetic
uguuacguuugguuuuucu

SEQ ID NO: 958 - RNA, 19 nt, Artificial Sequence
  Description of Artificial Sequence: synthetic
guugguguuacguuugguu

SEQ ID NO: 959 - RNA, 19 nt, Artificial Sequence
  Description of Artificial Sequence: synthetic
uuacguuugguuuuucuuu

SEQ ID NO: 960 - RNA, 19 nt, Artificial Sequence
  Description of Artificial Sequence: synthetic
gguguuacguuugguuuuu

SEQ ID NO: 961 - RNA, 19 nt, Artificial Sequence
  Description of Artificial Sequence: synthetic
guuacguuugguuuuucuu

SEQ ID NO: 962 - RNA, 19 nt, Artificial Sequence
  Description of Artificial Sequence: synthetic
uacguuugguuuuucuuug

SEQ ID NO: 963 - RNA, 19 nt, Artificial Sequence
  Description of Artificial Sequence: synthetic
cgcgaccuacgccgggggu

SEQ ID NO: 964 - RNA, 19 nt, Artificial Sequence
  Description of Artificial Sequence: synthetic
gcgaccuacgccggggguc

SEQ ID NO: 965 - RNA, 19 nt, Artificial Sequence
  Description of Artificial Sequence: synthetic
cacgacacucauacuaacg

SEQ ID NO: 966 - RNA, 19 nt, Artificial Sequence
  Description of Artificial Sequence: synthetic
gcacgacacucauacuaac

SEQ ID NO: 967 - RNA, 19 nt, Artificial Sequence
  Description of Artificial Sequence: synthetic
ugcacgacacucauacuaa

SEQ ID NO: 968 - RNA, 19 nt, Artificial Sequence
  Description of Artificial Sequence: synthetic
cgguugguguuacguuugg

SEQ ID NO: 969 - RNA, 19 nt, Artificial Sequence
  Description of Artificial Sequence: synthetic
gguugguguuacguuuggu

SEQ ID NO: 970 - RNA, 19 nt, Artificial Sequence
  Description of Artificial Sequence: synthetic
cucgcgggggcacgcccaa

SEQ ID NO: 971 - RNA, 19 nt, Artificial Sequence
  Description of Artificial Sequence: synthetic
cgcgggggcacgcccaaau

SEQ ID NO: 972 - RNA, 19 nt, Artificial Sequence
  Description of Artificial Sequence: synthetic
ucgcgggggcacgcccaaa

SEQ ID NO: 973 - RNA, 19 nt, Artificial Sequence
  Description of Artificial Sequence: synthetic
uugguguuacguuugguuu

SEQ ID NO: 974 - RNA, 19 nt, Artificial Sequence
  Description of Artificial Sequence: synthetic
ucucgcgggggcacgccca

SEQ ID NO: 975 - RNA, 19 nt, Artificial Sequence
  Description of Artificial Sequence: synthetic
acuccaccaacgaucugac

SEQ ID NO: 976 - RNA, 19 nt, Artificial Sequence
  Description of Artificial Sequence: synthetic
ccuggaggcugcacgacac

SEQ ID NO: 977 - RNA, 19 nt, Artificial Sequence
  Description of Artificial Sequence: synthetic
cuccaccaacgaucugacc

SEQ ID NO: 978 - RNA, 19 nt, Artificial Sequence
  Description of Artificial Sequence: synthetic
cuggaggcugcacgacacu

SEQ ID NO: 979 - RNA, 19 nt, Artificial Sequence
  Description of Artificial Sequence: synthetic
uggaggcugcacgacacuc

SEQ ID NO: 980 - RNA, 19 nt, Artificial Sequence
  Description of Artificial Sequence: synthetic
cauggugcacggucuacga

SEQ ID NO: 981 - RNA, 19 nt, Artificial Sequence
  Description of Artificial Sequence: synthetic
gugcucauggugcacgguc

SEQ ID NO: 982 - RNA, 19 nt, Artificial Sequence
  Description of Artificial Sequence: synthetic
gcugcacgacacucauacu

SEQ ID NO: 983 - RNA, 19 nt, Artificial Sequence
  Description of Artificial Sequence: synthetic
cugcacgacacucauacua

SEQ ID NO: 984 - RNA, 19 nt, Artificial Sequence
  Description of Artificial Sequence: synthetic
aacuccaccaacgaucuga

SEQ ID NO: 985 - RNA, 19 nt, Artificial Sequence
  Description of Artificial Sequence: synthetic
ugcucauggugcacggucu

SEQ ID NO: 986 - RNA, 19 nt, Artificial Sequence
  Description of Artificial Sequence: synthetic
ugguguuacguuugguuuu

SEQ ID NO: 987 - RNA, 19 nt, Artificial Sequence
  Description of Artificial Sequence: synthetic
cucauggugcacggucuac

SEQ ID NO: 988 - RNA, 19 nt, Artificial Sequence
  Description of Artificial Sequence: synthetic
auggugcacggucuacgag

SEQ ID NO: 989 - RNA, 19 nt, Artificial Sequence
  Description of Artificial Sequence: synthetic
ucauggugcacggucuacg

SEQ ID NO: 990 - RNA, 19 nt, Artificial Sequence
  Description of Artificial Sequence: synthetic
uacccgggcugagcccagg

SEQ ID NO: 991 - RNA, 19 nt, Artificial Sequence
  Description of Artificial Sequence: synthetic
gcucauggugcacggucua

SEQ ID NO: 992 - RNA, 19 nt, Artificial Sequence
  Description of Artificial Sequence: synthetic
gugcacggucuacgagacc

SEQ ID NO: 993 - RNA, 19 nt, Artificial Sequence
  Description of Artificial Sequence: synthetic
uggugcacggucuacgaga

SEQ ID NO: 994 - RNA, 19 nt, Artificial Sequence
  Description of Artificial Sequence: synthetic
ggugcacggucuacgagac

SEQ ID NO: 995 - RNA, 19 nt, Artificial Sequence
  Description of Artificial Sequence: synthetic
uaucgaugaccuuacccaa

SEQ ID NO: 996 - RNA, 19 nt, Artificial Sequence
  Description of Artificial Sequence: synthetic
uaccccaugaggucggcga

SEQ ID NO: 997 - RNA, 19 nt, Artificial Sequence
  Description of Artificial Sequence: synthetic
guuugguuuuucuuugagg

SEQ ID NO: 998 - RNA, 19 nt, Artificial Sequence
  Description of Artificial Sequence: synthetic
gucucgcgggggcacgccc

SEQ ID NO: 999 - RNA, 19 nt, Artificial Sequence
  Description of Artificial Sequence: synthetic
gcuaucagccgguucaucc

SEQ ID NO: 1000 - RNA, 19 nt, Artificial Sequence
  Description of Artificial Sequence: synthetic
cuaucagccgguucaucca

SEQ ID NO: 1001 - RNA, 19 nt, Artificial Sequence
  Description of Artificial Sequence: synthetic
cguuugguuuuucuuugag

SEQ ID NO: 1002 - RNA, 19 nt, Artificial Sequence
  Description of Artificial Sequence: synthetic
accgcucggaagucuuccu

SEQ ID NO: 1003 - RNA, 19 nt, Artificial Sequence
  Description of Artificial Sequence: synthetic
acguuugguuuuucuuuga

SEQ ID NO: 1004 - RNA, 19 nt, Artificial Sequence
  Description of Artificial Sequence: synthetic
gaccgcucggaagucuucc

SEQ ID NO: 1005 - RNA, 19 nt, Artificial Sequence
  Description of Artificial Sequence: synthetic
guaccccaugaggucggcg

SEQ ID NO: 1006 - RNA, 19 nt, Artificial Sequence
  Description of Artificial Sequence: synthetic
gguugcgaccgcucggaag

SEQ ID NO: 1007 - RNA, 19 nt, Artificial Sequence
  Description of Artificial Sequence: synthetic
agucucgcgggggcacgcc

SEQ ID NO: 1008 - RNA, 19 nt, Artificial Sequence
  Description of Artificial Sequence: synthetic
aggcugcacgacacucaua

SEQ ID NO: 1009 - RNA, 19 nt, Artificial Sequence
  Description of Artificial Sequence: synthetic
uagcagucucgcgggggca

SEQ ID NO: 1010 - RNA, 19 nt, Artificial Sequence
  Description of Artificial Sequence: synthetic
uacucggcuagcagucucg

SEQ ID NO: 1011 - RNA, 19 nt, Artificial Sequence
  Description of Artificial Sequence: synthetic
ggaggcugcacgacacuca

SEQ ID NO: 1012 - RNA, 19 nt, Artificial Sequence
  Description of Artificial Sequence: synthetic
cuagcagucucgcgggggc

SEQ ID NO: 1013 - RNA, 19 nt, Artificial Sequence
  Description of Artificial Sequence: synthetic
cuacucggcuagcagucuc

SEQ ID NO: 1014 - RNA, 19 nt, Artificial Sequence
  Description of Artificial Sequence: synthetic
gcuagcagucucgcggggg

SEQ ID NO: 1015 - RNA, 19 nt, Artificial Sequence
  Description of Artificial Sequence: synthetic
cucggcuagcagucucgcg

SEQ ID NO: 1016 - RNA, 19 nt, Artificial Sequence
  Description of Artificial Sequence: synthetic
ggcugcacgacacucauac

SEQ ID NO: 1017 - RNA, 19 nt, Artificial Sequence
  Description of Artificial Sequence: synthetic
gaggcugcacgacacucau

SEQ ID NO: 1018 - RNA, 19 nt, Artificial Sequence
  Description of Artificial Sequence: synthetic
acucggcuagcagucucgc

SEQ ID NO: 1019 - RNA, 19 nt, Artificial Sequence
  Description of Artificial Sequence: synthetic
ggcuagcagucucgcgggg

SEQ ID NO: 1020 - RNA, 19 nt, Artificial Sequence
  Description of Artificial Sequence: synthetic
ucggcuagcagucucgcgg

SEQ ID NO: 1021 - RNA, 19 nt, Artificial Sequence
  Description of Artificial Sequence: synthetic
cggcuagcagucucgcggg

SEQ ID NO: 1022 - RNA, 19 nt, Artificial Sequence
  Description of Artificial Sequence: synthetic
cagucucgcgggggcacgc

SEQ ID NO: 1023 - RNA, 19 nt, Artificial Sequence
  Description of Artificial Sequence: synthetic
ucucccgggaggggggguc

SEQ ID NO: 1024 - RNA, 19 nt, Artificial Sequence
  Description of Artificial Sequence: synthetic
ugauccaagaaaggacccg

SEQ ID NO: 1025 - RNA, 19 nt, Artificial Sequence
  Description of Artificial Sequence: synthetic
agcagucucgcgggggcac

SEQ ID NO: 1026 - RNA, 19 nt, Artificial Sequence
  Description of Artificial Sequence: synthetic
gcagucucgcgggggcacg

SEQ ID NO: 1027 - RNA, 19 nt, Artificial Sequence
  Description of Artificial Sequence: synthetic
accccaugaggucggcgaa

SEQ ID NO: 1028 - RNA, 19 nt, Artificial Sequence
  Description of Artificial Sequence: synthetic
acuugacguccugugggcg

SEQ ID NO: 1029 - RNA, 19 nt, Artificial Sequence
  Description of Artificial Sequence: synthetic
aacuugacguccugugggc

SEQ ID NO: 1030 - RNA, 19 nt, Artificial Sequence
  Description of Artificial Sequence: synthetic
cucucccgggagggggggu

SEQ ID NO: 1031 - RNA, 19 nt, Artificial Sequence
  Description of Artificial Sequence: synthetic
cucccgggagggggggucc

SEQ ID NO: 1032 - RNA, 19 nt, Artificial Sequence
  Description of Artificial Sequence: synthetic
gauccaagaaaggacccgg

SEQ ID NO: 1033 - RNA, 19 nt, Artificial Sequence
  Description of Artificial Sequence: synthetic
cccgggaggggggguccug

SEQ ID NO: 1034 - RNA, 19 nt, Artificial Sequence
  Description of Artificial Sequence: synthetic
cccgggaacuugacguccu

SEQ ID NO: 1035 - RNA, 19 nt, Artificial Sequence
  Description of Artificial Sequence: synthetic
ucccgggaggggggguccu

SEQ ID NO: 1036 - RNA, 19 nt, Artificial Sequence
  Description of Artificial Sequence: synthetic
ggaacuugacguccugugg

SEQ ID NO: 1037 - RNA, 19 nt, Artificial Sequence
  Description of Artificial Sequence: synthetic
ccgggaacuugacguccug

SEQ ID NO: 1038 - RNA, 19 nt, Artificial Sequence
  Description of Artificial Sequence: synthetic
cgggaacuugacguccugu

SEQ ID NO: 1039 - RNA, 19 nt, Artificial Sequence
  Description of Artificial Sequence: synthetic
gggaacuugacguccugug

SEQ ID NO: 1040 - RNA, 19 nt, Artificial Sequence
  Description of Artificial Sequence: synthetic
ucagccgguucauccacug

SEQ ID NO: 1041 - RNA, 19 nt, Artificial Sequence
  Description of Artificial Sequence: synthetic
ggguacccgggcugagccc

SEQ ID NO: 1042 - RNA, 19 nt, Artificial Sequence
  Description of Artificial Sequence: synthetic
cgagguugcgaccgcucgg

SEQ ID NO: 1043 - RNA, 19 nt, Artificial Sequence
  Description of Artificial Sequence: synthetic
guacccgggcugagcccag

SEQ ID NO: 1044 - RNA, 19 nt, Artificial Sequence
  Description of Artificial Sequence: synthetic
aucagccgguucauccacu

SEQ ID NO: 1045 - RNA, 19 nt, Artificial Sequence
  Description of Artificial Sequence: synthetic
gagguugcgaccgcucgga

SEQ ID NO: 1046 - RNA, 19 nt, Artificial Sequence
  Description of Artificial Sequence: synthetic
gguacccgggcugagccca

SEQ ID NO: 1047 - RNA, 19 nt, Artificial Sequence
  Description of Artificial Sequence: synthetic
uagaggggccaaggguacc

SEQ ID NO: 1048 - RNA, 19 nt, Artificial Sequence
  Description of Artificial Sequence: synthetic
agguugcgaccgcucggaa

SEQ ID NO: 1049 - RNA, 19 nt, Artificial Sequence
  Description of Artificial Sequence: synthetic
agaggggccaaggguaccc

SEQ ID NO: 1050 - RNA, 19 nt, Artificial Sequence
  Description of Artificial Sequence: synthetic
uugauccaagaaaggaccc

SEQ ID NO: 1051 - RNA, 19 nt, Artificial Sequence
  Description of Artificial Sequence: synthetic
gaacuugacguccuguggg

SEQ ID NO: 1052 - RNA, 19 nt, Artificial Sequence
  Description of Artificial Sequence: synthetic
agauagagaaagagcaacc

SEQ ID NO: 1053 - RNA, 19 nt, Artificial Sequence
  Description of Artificial Sequence: synthetic
caggagccauccugcccac

SEQ ID NO: 1054 - RNA, 19 nt, Artificial Sequence
  Description of Artificial Sequence: synthetic
aggagccauccugcccacc

SEQ ID NO: 1055 - RNA, 19 nt, Artificial Sequence
  Description of Artificial Sequence: synthetic
aagauagagaaagagcaac

SEQ ID NO: 1056 - RNA, 19 nt, Artificial Sequence
  Description of Artificial Sequence: synthetic
uaucagccgguucauccac

SEQ ID NO: 1057 - RNA, 19 nt, Artificial Sequence
  Description of Artificial Sequence: synthetic
ccgggaggggggguccugg

SEQ ID NO: 1058 - RNA, 19 nt, Artificial Sequence
  Description of Artificial Sequence: synthetic
ggagccauccugcccaccc

SEQ ID NO: 1059 - RNA, 19 nt, Artificial Sequence
  Description of Artificial Sequence: synthetic
agucauagccuccgugaag

SEQ ID NO: 1060 - RNA, 19 nt, Artificial Sequence
  Description of Artificial Sequence: synthetic
acguccugugggcggcggu

SEQ ID NO: 1061 - RNA, 19 nt, Artificial Sequence
  Description of Artificial Sequence: synthetic
cgggaggggggguccugga

SEQ ID NO: 1062 - RNA, 19 nt, Artificial Sequence
  Description of Artificial Sequence: synthetic
gaccaguucaucaucauau

SEQ ID NO: 1063 - RNA, 19 nt, Artificial Sequence
  Description of Artificial Sequence: synthetic
uagucauagccuccgugaa

SEQ ID NO: 1064 - RNA, 19 nt, Artificial Sequence
  Description of Artificial Sequence: synthetic
cuagucauagccuccguga

SEQ ID NO: 1065 - RNA, 19 nt, Artificial Sequence
  Description of Artificial Sequence: synthetic
acgcuaucagccgguucau

SEQ ID NO: 1066 - RNA, 19 nt, Artificial Sequence
  Description of Artificial Sequence: synthetic
caguucaucaucauauccc

SEQ ID NO: 1067 - RNA, 19 nt, Artificial Sequence
  Description of Artificial Sequence: synthetic
agccgguucauccacugca

SEQ ID NO: 1068 - RNA, 19 nt, Artificial Sequence
  Description of Artificial Sequence: synthetic
gccgguucauccacugcac

SEQ ID NO: 1069 - RNA, 19 nt, Artificial Sequence
  Description of Artificial Sequence: synthetic
aacgcuaucagccgguuca

SEQ ID NO: 1070 - RNA, 19 nt, Artificial Sequence
  Description of Artificial Sequence: synthetic
ccaguucaucaucauaucc

SEQ ID NO: 1071 - RNA, 19 nt, Artificial Sequence
  Description of Artificial Sequence: synthetic
aggaagauagagaaagagc

SEQ ID NO: 1072 - RNA, 19 nt, Artificial Sequence
  Description of Artificial Sequence: synthetic
augguggagugucgccccc

SEQ ID NO: 1073 - RNA, 19 nt, Artificial Sequence
  Description of Artificial Sequence: synthetic
cgcuaucagccgguucauc

SEQ ID NO: 1074 - RNA, 19 nt, Artificial Sequence
  Description of Artificial Sequence: synthetic
accaguucaucaucauauc

SEQ ID NO: 1075 - RNA, 19 nt, Artificial Sequence
  Description of Artificial Sequence: synthetic
aguucaucaucauauccca

SEQ ID NO: 1076 - RNA, 19 nt, Artificial Sequence
  Description of Artificial Sequence: synthetic
gaagauagagaaagagcaa

SEQ ID NO: 1077 - RNA, 19 nt, Artificial Sequence
  Description of Artificial Sequence: synthetic
ugguggagugucgccccca

SEQ ID NO: 1078 - RNA, 19 nt, Artificial Sequence
  Description of Artificial Sequence: synthetic
ggaagauagagaaagagca

SEQ ID NO: 1079 - RNA, 19 nt, Artificial Sequence
  Description of Artificial Sequence: synthetic
guugauccaagaaaggacc

SEQ ID NO: 1080 - RNA, 19 nt, Artificial Sequence
  Description of Artificial Sequence: synthetic
gcgaccgcucggaagucuu

SEQ ID NO: 1081 - RNA, 19 nt, Artificial Sequence
  Description of Artificial Sequence: synthetic
ggccaaggguacccgggcu

SEQ ID NO: 1082 - RNA, 19 nt, Artificial Sequence
  Description of Artificial Sequence: synthetic
agcggguugauccaagaaa

SEQ ID NO: 1083 - RNA, 19 nt, Artificial Sequence
  Description of Artificial Sequence: synthetic
gccaaggguacccgggcug

SEQ ID NO: 1084 - RNA, 19 nt, Artificial Sequence
  Description of Artificial Sequence: synthetic
ugcgaccgcucggaagucu

SEQ ID NO: 1085 - RNA, 19 nt, Artificial Sequence
  Description of Artificial Sequence: synthetic
gagcggguugauccaagaa

SEQ ID NO: 1086 - RNA, 19 nt, Artificial Sequence
  Description of Artificial Sequence: synthetic
ggggccaaggguacccggg

SEQ ID NO: 1087 - RNA, 19 nt, Artificial Sequence
  Description of Artificial Sequence: synthetic
gguugauccaagaaaggac

SEQ ID NO: 1088 - RNA, 19 nt, Artificial Sequence
  Description of Artificial Sequence: synthetic
gcggguugauccaagaaag

SEQ ID NO: 1089 - RNA, 19 nt, Artificial Sequence
  Description of Artificial Sequence: synthetic
cggguugauccaagaaagg

SEQ ID NO: 1090 - RNA, 19 nt, Artificial Sequence
  Description of Artificial Sequence: synthetic
ggguugauccaagaaagga

SEQ ID NO: 1091 - RNA, 19 nt, Artificial Sequence
  Description of Artificial Sequence: synthetic
gaccaccgcccgggaacuu

SEQ ID NO: 1092 - RNA, 19 nt, Artificial Sequence
  Description of Artificial Sequence: synthetic
cagccgguucauccacugc

SEQ ID NO: 1093 - RNA, 19 nt, Artificial Sequence
  Description of Artificial Sequence: synthetic
aggggccaaggguacccgg

SEQ ID NO: 1094 - RNA, 19 nt, Artificial Sequence
  Description of Artificial Sequence: synthetic
ugaccaccgcccgggaacu

SEQ ID NO: 1095 - RNA, 19 nt, Artificial Sequence
  Description of Artificial Sequence: synthetic
uugagcggguugauccaag

SEQ ID NO: 1096 - RNA, 19 nt, Artificial Sequence
  Description of Artificial Sequence: synthetic
gcauugagcggguugaucc

SEQ ID NO: 1097 - RNA, 19 nt, Artificial Sequence
  Description of Artificial Sequence: synthetic
guugcgaccgcucggaagu

SEQ ID NO: 1098 - RNA, 19 nt, Artificial Sequence
  Description of Artificial Sequence: synthetic
ugagcggguugauccaaga

SEQ ID NO: 1099 - RNA, 19 nt, Artificial Sequence
  Description of Artificial Sequence: synthetic
auugagcggguugauccaa

SEQ ID NO: 1100 - RNA, 19 nt, Artificial Sequence
  Description of Artificial Sequence: synthetic
cguccugugggcggcgguu

SEQ ID NO: 1101 - RNA, 19 nt, Artificial Sequence
  Description of Artificial Sequence: synthetic
ccuguugcauaguucacgc

SEQ ID NO: 1102 - RNA, 19 nt, Artificial Sequence
  Description of Artificial Sequence: synthetic
aggcauugagcggguugau

SEQ ID NO: 1103 - RNA, 19 nt, Artificial Sequence
  Description of Artificial Sequence: synthetic
ggcauugagcggguugauc

SEQ ID NO: 1104 - RNA, 19 nt, Artificial Sequence
  Description of Artificial Sequence: synthetic
ccaggcauugagcggguug

SEQ ID NO: 1105 - RNA, 19 nt, Artificial Sequence
  Description of Artificial Sequence: synthetic
cccaugaggucggcgaagc

SEQ ID NO: 1106 - RNA, 19 nt, Artificial Sequence
  Description of Artificial Sequence: synthetic
uugcgaccgcucggaaguc

SEQ ID NO: 1107 - RNA, 19 nt, Artificial Sequence
  Description of Artificial Sequence: synthetic
caggcauugagcggguuga

SEQ ID NO: 1108 - RNA, 19 nt, Artificial Sequence
  Description of Artificial Sequence: synthetic
ccaugaggucggcgaagcc

SEQ ID NO: 1109 - RNA, 19 nt, Artificial Sequence
  Description of Artificial Sequence: synthetic
cauugagcggguugaucca

SEQ ID NO: 1110 - RNA, 19 nt, Artificial Sequence
  Description of Artificial Sequence: synthetic
acgaucugaccaccgcccg

SEQ ID NO: 1111 - RNA, 19 nt, Artificial Sequence
  Description of Artificial Sequence: synthetic
uugccauagaggggccaag

SEQ ID NO: 1112 - RNA, 19 nt, Artificial Sequence
  Description of Artificial Sequence: synthetic
cgaucugaccaccgcccgg

SEQ ID NO: 1113 - RNA, 19 nt, Artificial Sequence
  Description of Artificial Sequence: synthetic
agccauccugcccacccca

SEQ ID NO: 1114 - RNA, 19 nt, Artificial Sequence
  Description of Artificial Sequence: synthetic
gcggcaacagguaaacucc

SEQ ID NO: 1115 - RNA, 19 nt, Artificial Sequence
  Description of Artificial Sequence: synthetic
ugccauagaggggccaagg

SEQ ID NO: 1116 - RNA, 19 nt, Artificial Sequence
  Description of Artificial Sequence: synthetic
ggcaacagguaaacuccac

SEQ ID NO: 1117 - RNA, 19 nt, Artificial Sequence
  Description of Artificial Sequence: synthetic
gcaacagguaaacuccacc

SEQ ID NO: 1118 - RNA, 19 nt, Artificial Sequence
  Description of Artificial Sequence: synthetic
ucugaccaccgcccgggaa

SEQ ID NO: 1119 - RNA, 19 nt, Artificial Sequence
  Description of Artificial Sequence: synthetic
uucccuguugcauaguuca

SEQ ID NO: 1120 - RNA, 19 nt, Artificial Sequence
  Description of Artificial Sequence: synthetic
gcgcggcaacagguaaacu

SEQ ID NO: 1121 - RNA, 19 nt, Artificial Sequence
  Description of Artificial Sequence: synthetic
ucccuguugcauaguucac

SEQ ID NO: 1122 - RNA, 19 nt, Artificial Sequence
  Description of Artificial Sequence: synthetic
ccugcgcggcaacagguaa

SEQ ID NO: 1123 - RNA, 19 nt, Artificial Sequence
  Description of Artificial Sequence: synthetic
aucugaccaccgcccggga

SEQ ID NO: 1124 - RNA, 19 nt, Artificial Sequence
  Description of Artificial Sequence: synthetic
cugaccaccgcccgggaac

SEQ ID NO: 1125 - RNA, 19 nt, Artificial Sequence
  Description of Artificial Sequence: synthetic
gggccaaggguacccgggc

SEQ ID NO: 1126 - RNA, 19 nt, Artificial Sequence
  Description of Artificial Sequence: synthetic
ccuucgccuucaucuccuu

SEQ ID NO: 1127 - RNA, 19 nt, Artificial Sequence
  Description of Artificial Sequence: synthetic
gccuucgccuucaucuccu

SEQ ID NO: 1128 - RNA, 19 nt, Artificial Sequence
  Description of Artificial Sequence: synthetic
ugcgcggcaacagguaaac

SEQ ID NO: 1129 - RNA, 19 nt, Artificial Sequence
  Description of Artificial Sequence: synthetic
ggccccugcgcggcaacag

SEQ ID NO: 1130 - RNA, 19 nt, Artificial Sequence
  Description of Artificial Sequence: synthetic
gugggcggcgguugguguu

SEQ ID NO: 1131 - RNA, 19 nt, Artificial Sequence
  Description of Artificial Sequence: synthetic
cgcggcaacagguaaacuc

SEQ ID NO: 1132 - RNA, 19 nt, Artificial Sequence
  Description of Artificial Sequence: synthetic
cugcgcggcaacagguaaa

SEQ ID NO: 1133 - RNA, 19 nt, Artificial Sequence
  Description of Artificial Sequence: synthetic
gagccauccugcccacccc

SEQ ID NO: 1134 - RNA, 19 nt, Artificial Sequence
  Description of Artificial Sequence: synthetic
cgaccgcucggaagucuuc

SEQ ID NO: 1135 - RNA, 19 nt, Artificial Sequence
  Description of Artificial Sequence: synthetic
ccccugcgcggcaacaggu

SEQ ID NO: 1136 - RNA, 19 nt, Artificial Sequence
  Description of Artificial Sequence: synthetic
cccugcgcggcaacaggua

SEQ ID NO: 1137 - RNA, 19 nt, Artificial Sequence
  Description of Artificial Sequence: synthetic
cugcccaguugaagaggua

SEQ ID NO: 1138 - RNA, 19 nt, Artificial Sequence
  Description of Artificial Sequence: synthetic
cccuguugcauaguucacg

SEQ ID NO: 1139 - RNA, 19 nt, Artificial Sequence
  Description of Artificial Sequence: synthetic
ugugggcggcgguuggugu

SEQ ID NO: 1140 - RNA, 19 nt, Artificial Sequence
  Description of Artificial Sequence: synthetic
gaucugaccaccgcccggg

SEQ ID NO: 1141 - RNA, 19 nt, Artificial Sequence
  Description of Artificial Sequence: synthetic
acugcccaguugaagaggu

SEQ ID NO: 1142 - RNA, 19 nt, Artificial Sequence
  Description of Artificial Sequence: synthetic
ccccaugaggucggcgaag

SEQ ID NO: 1143 - RNA, 19 nt, Artificial Sequence
  Description of Artificial Sequence: synthetic
gccccugcgcggcaacagg

SEQ ID NO: 1144 - RNA, 19 nt, Artificial Sequence
  Description of Artificial Sequence: synthetic
uccugugggcggcgguugg

SEQ ID NO: 1145 - RNA, 19 nt, Artificial Sequence
  Description of Artificial Sequence: synthetic
ccugugggcggcgguuggu

SEQ ID NO: 1146 - RNA, 19 nt, Artificial Sequence
  Description of Artificial Sequence: synthetic
cggcaacagguaaacucca

SEQ ID NO: 1147 - RNA, 19 nt, Artificial Sequence
  Description of Artificial Sequence: synthetic
cugugggcggcgguuggug

SEQ ID NO: 1148 - RNA, 19 nt, Artificial Sequence
  Description of Artificial Sequence: synthetic
gcgguugguguuacguuug

SEQ ID NO: 1149 - RNA, 19 nt, Artificial Sequence
  Description of Artificial Sequence: synthetic
cuccagccgucuccgcuug

SEQ ID NO: 1150 - RNA, 19 nt, Artificial Sequence
  Description of Artificial Sequence: synthetic
accuagucauagccuccgu

SEQ ID NO: 1151 - RNA, 19 nt, Artificial Sequence
  Description of Artificial Sequence: synthetic
ugggcggcgguugguguua

SEQ ID NO: 1152 - RNA, 19 nt, Artificial Sequence
  Description of Artificial Sequence: synthetic
gguaaacuccaccaacgau

SEQ ID NO: 1153 - RNA, 19 nt, Artificial Sequence
  Description of Artificial Sequence: synthetic
gcugugauauaugucuccc

SEQ ID NO: 1154 - RNA, 19 nt, Artificial Sequence
  Description of Artificial Sequence: synthetic
ugucgccuuccacgagguu

SEQ ID NO: 1155 - RNA, 19 nt, Artificial Sequence
  Description of Artificial Sequence: synthetic
ugugauauaugucuccccc

SEQ ID NO: 1156 - RNA, 19 nt, Artificial Sequence
  Description of Artificial Sequence: synthetic
cggcgguugguguuacguu

SEQ ID NO: 1157 - RNA, 19 nt, Artificial Sequence
  Description of Artificial Sequence: synthetic
ggcgguugguguuacguuu

SEQ ID NO: 1158 - RNA, 19 nt, Artificial Sequence
  Description of Artificial Sequence: synthetic
cugugauauaugucucccc

SEQ ID NO: 1159 - RNA, 19 nt, Artificial Sequence
  Description of Artificial Sequence: synthetic
acgccuucgccuucaucuc

SEQ ID NO: 1160 - RNA, 19 nt, Artificial Sequence
  Description of Artificial Sequence: synthetic
gcuccagccgucuccgcuu

SEQ ID NO: 1161 - RNA, 19 nt, Artificial Sequence
  Description of Artificial Sequence: synthetic
auagaggggccaaggguac

SEQ ID NO: 1162 - RNA, 19 nt, Artificial Sequence
  Description of Artificial Sequence: synthetic
ggaggggggguccuggagg

SEQ ID NO: 1163 - RNA, 19 nt, Artificial Sequence
  Description of Artificial Sequence: synthetic
gggaggggggguccuggag

SEQ ID NO: 1164 - RNA, 19 nt, Artificial Sequence
  Description of Artificial Sequence: synthetic
cauagaggggccaagggua

SEQ ID NO: 1165 - RNA, 19 nt, Artificial Sequence
  Description of Artificial Sequence: synthetic
gucgccuuccacgagguug

SEQ ID NO: 1166 - RNA, 19 nt, Artificial Sequence
  Description of Artificial Sequence: synthetic
uaccuagucauagccuccg

SEQ ID NO: 1167 - RNA, 19 nt, Artificial Sequence
  Description of Artificial Sequence: synthetic
cgccuucgccuucaucucc

SEQ ID NO: 1168 - RNA, 19 nt, Artificial Sequence
  Description of Artificial Sequence: synthetic
gacgccuucgccuucaucu

SEQ ID NO: 1169 - RNA, 19 nt, Artificial Sequence
  Description of Artificial Sequence: synthetic
gggcggcgguugguguuac

SEQ ID NO: 1170 - RNA, 19 nt, Artificial Sequence
  Description of Artificial Sequence: synthetic
ggcggcgguugguguuacg

SEQ ID NO: 1171 - RNA, 19 nt, Artificial Sequence
  Description of Artificial Sequence: synthetic
gcggcgguugguguuacgu

SEQ ID NO: 1172 - RNA, 19 nt, Artificial Sequence
  Description of Artificial Sequence: synthetic
ccuagucauagccuccgug

SEQ ID NO: 1173 - RNA, 19 nt, Artificial Sequence
  Description of Artificial Sequence: synthetic
acagguaaacuccaccaac

SEQ ID NO: 1174 - RNA, 19 nt, Artificial Sequence
  Description of Artificial Sequence: synthetic
cagguaaacuccaccaacg

SEQ ID NO: 1175 - RNA, 19 nt, Artificial Sequence
  Description of Artificial Sequence: synthetic
ccauagaggggccaagggu

SEQ ID NO: 1176 - RNA, 19 nt, Artificial Sequence
  Description of Artificial Sequence: synthetic
aacagguaaacuccaccaa

SEQ ID NO: 1177 - RNA, 19 nt, Artificial Sequence
  Description of Artificial Sequence: synthetic
caacagguaaacuccacca

SEQ ID NO: 1178 - RNA, 19 nt, Artificial Sequence
  Description of Artificial Sequence: synthetic
agguaaacuccaccaacga

SEQ ID NO: 1179 - RNA, 19 nt, Artificial Sequence
  Description of Artificial Sequence: synthetic
gaggggccaaggguacccg

SEQ ID NO: 1180 - RNA, 19 nt, Artificial Sequence
  Description of Artificial Sequence: synthetic
aggguacccgggcugagcc

SEQ ID NO: 1181 - RNA, 19 nt, Artificial Sequence
  Description of Artificial Sequence: synthetic
uccucacaggggagugauc

SEQ ID NO: 1182 - RNA, 19 nt, Artificial Sequence
  Description of Artificial Sequence: synthetic
caccaacgaucugaccacc

SEQ ID NO: 1183 - RNA, 19 nt, Artificial Sequence
  Description of Artificial Sequence: synthetic
ggacgccuucgccuucauc

SEQ ID NO: 1184 - RNA, 19 nt, Artificial Sequence
  Description of Artificial Sequence: synthetic
gggugacaggagccauccu

SEQ ID NO: 1185 - RNA, 19 nt, Artificial Sequence
  Description of Artificial Sequence: synthetic
caaggguacccgggcugag

SEQ ID NO: 1186 - RNA, 19 nt, Artificial Sequence
  Description of Artificial Sequence: synthetic
ccaaggguacccgggcuga

SEQ ID NO: 1187 - RNA, 19 nt, Artificial Sequence
  Description of Artificial Sequence: synthetic
uggacgccuucgccuucau

SEQ ID NO: 1188 - RNA, 19 nt, Artificial Sequence
  Description of Artificial Sequence: synthetic
gugauauaugucucccccg

SEQ ID NO: 1189 - RNA, 19 nt, Artificial Sequence
  Description of Artificial Sequence: synthetic
ggugacaggagccauccug

SEQ ID NO: 1190 - RNA, 19 nt, Artificial Sequence
  Description of Artificial Sequence: synthetic
guggacgccuucgccuuca

SEQ ID NO: 1191 - RNA, 19 nt, Artificial Sequence
  Description of Artificial Sequence: synthetic
uccaccaacgaucugacca

SEQ ID NO: 1192 - RNA, 19 nt, Artificial Sequence
  Description of Artificial Sequence: synthetic
aaggguacccgggcugagc

SEQ ID NO: 1193 - RNA, 19 nt, Artificial Sequence
  Description of Artificial Sequence: synthetic
ccaccaacgaucugaccac

SEQ ID NO: 1194 - RNA, 19 nt, Artificial Sequence
  Description of Artificial Sequence: synthetic
ggggggguccuggaggcug

SEQ ID NO: 1195 - RNA, 19 nt, Artificial Sequence
  Description of Artificial Sequence: synthetic
caacgaucugaccaccgcc

SEQ ID NO: 1196 - RNA, 19 nt, Artificial Sequence
  Description of Artificial Sequence: synthetic
gaggggggguccuggaggc

SEQ ID NO: 1197 - RNA, 19 nt, Artificial Sequence
  Description of Artificial Sequence: synthetic
cgaacgcuaucagccgguu

SEQ ID NO: 1198 - RNA, 19 nt, Artificial Sequence
  Description of Artificial Sequence: synthetic
aggggggguccuggaggcu

SEQ ID NO: 1199 - RNA, 19 nt, Artificial Sequence
  Description of Artificial Sequence: synthetic
caugaggucggcgaagccg

SEQ ID NO: 1200 - RNA, 19 nt, Artificial Sequence
  Description of Artificial Sequence: synthetic
gcgcuccagccgucuccgc

SEQ ID NO: 1201 - RNA, 19 nt, Artificial Sequence
  Description of Artificial Sequence: synthetic
agcggaauguaccccauga

SEQ ID NO: 1202 - RNA, 19 nt, Artificial Sequence
  Description of Artificial Sequence: synthetic
gaacgcuaucagccgguuc

SEQ ID NO: 1203 - RNA, 19 nt, Artificial Sequence
  Description of Artificial Sequence: synthetic
ccaacgaucugaccaccgc

SEQ ID NO: 1204 - RNA, 19 nt, Artificial Sequence
  Description of Artificial Sequence: synthetic
ugacaggagccauccugcc

SEQ ID NO: 1205 - RNA, 19 nt, Artificial Sequence
  Description of Artificial Sequence: synthetic
gugacaggagccauccugc

SEQ ID NO: 1206 - RNA, 19 nt, Artificial Sequence
  Description of Artificial Sequence: synthetic
ucgaugaccuuacccaaau

SEQ ID NO: 1207 - RNA, 19 nt, Artificial Sequence
  Description of Artificial Sequence: synthetic
gcgaacgcuaucagccggu

SEQ ID NO: 1208 - RNA, 19 nt, Artificial Sequence
  Description of Artificial Sequence: synthetic
cgcgcuccagccgucuccg

SEQ ID NO: 1209 - RNA, 19 nt, Artificial Sequence
  Description of Artificial Sequence: synthetic
augaggucggcgaagccgc

SEQ ID NO: 1210 - RNA, 19 nt, Artificial Sequence
  Description of Artificial Sequence: synthetic
cgaugaccuuacccaaauu

SEQ ID NO: 1211 - RNA, 19 nt, Artificial Sequence
  Description of Artificial Sequence: synthetic
aacgaucugaccaccgccc

SEQ ID NO: 1212 - RNA, 19 nt, Artificial Sequence
  Description of Artificial Sequence: synthetic
guccugugggcggcgguug

SEQ ID NO: 1213 - RNA, 19 nt, Artificial Sequence
  Description of Artificial Sequence: synthetic
ugaggucggcgaagccgca

SEQ ID NO: 1214 - RNA, 19 nt, Artificial Sequence
  Description of Artificial Sequence: synthetic
accaacgaucugaccaccg

SEQ ID NO: 1215 - RNA, 19 nt, Artificial Sequence
  Description of Artificial Sequence: synthetic
uagucgcgcgcacacccaa

SEQ ID NO: 1216 - RNA, 19 nt, Artificial Sequence
  Description of Artificial Sequence: synthetic
uuccuagucgcgcgcacac

SEQ ID NO: 1217 - RNA, 19 nt, Artificial Sequence
  Description of Artificial Sequence: synthetic
cggggugacaggagccauc

SEQ ID NO: 1218 - RNA, 19 nt, Artificial Sequence
  Description of Artificial Sequence: synthetic
ggggugacaggagccaucc

SEQ ID NO: 1219 - RNA, 19 nt, Artificial Sequence
  Description of Artificial Sequence: synthetic
cuuccuagucgcgcgcaca

SEQ ID NO: 1220 - RNA, 19 nt, Artificial Sequence
  Description of Artificial Sequence: synthetic
cuagucgcgcgcacaccca

SEQ ID NO: 1221 - RNA, 19 nt, Artificial Sequence
  Description of Artificial Sequence: synthetic
uccuagucgcgcgcacacc

SEQ ID NO: 1222 - RNA, 19 nt, Artificial Sequence
  Description of Artificial Sequence: synthetic
ccuagucgcgcgcacaccc

SEQ ID NO: 1223 - RNA, 19 nt, Artificial Sequence
  Description of Artificial Sequence: synthetic
uacgcgaccuacgccgggg

SEQ ID NO: 1224 - RNA, 19 nt, Artificial Sequence
  Description of Artificial Sequence: synthetic
gggauagguugucgccuuc

SEQ ID NO: 1225 - RNA, 19 nt, Artificial Sequence
  Description of Artificial Sequence: synthetic
uuacgcgaccuacgccggg

SEQ ID NO: 1226 - RNA, 19 nt, Artificial Sequence
  Description of Artificial Sequence: synthetic
cgcuccagccgucuccgcu

SEQ ID NO: 1227 - RNA, 19 nt, Artificial Sequence
  Description of Artificial Sequence: synthetic
acgcgaccuacgccggggg

SEQ ID NO: 1228 - RNA, 19 nt, Artificial Sequence
  Description of Artificial Sequence: synthetic
acuguggacgccuucgccu

SEQ ID NO: 1229 - RNA, 19 nt, Artificial Sequence
  Description of Artificial Sequence: synthetic
cuguggacgccuucgccuu

SEQ ID NO: 1230 - RNA, 19 nt, Artificial Sequence
  Description of Artificial Sequence: synthetic
agucgcgcgcacacccaac

SEQ ID NO: 1231 - RNA, 19 nt, Artificial Sequence
  Description of Artificial Sequence: synthetic
gcggaauguaccccaugag

SEQ ID NO: 1232 - RNA, 19 nt, Artificial Sequence
  Description of Artificial Sequence: synthetic
ggauagguugucgccuucc

SEQ ID NO: 1233 - RNA, 19 nt, Artificial Sequence
  Description of Artificial Sequence: synthetic
ccgucggcaaggaacuugc

SEQ ID NO: 1234 - RNA, 19 nt, Artificial Sequence
  Description of Artificial Sequence: synthetic
ggggguccuggaggcugca

SEQ ID NO: 1235 - RNA, 19 nt, Artificial Sequence
  Description of Artificial Sequence: synthetic
cacgagcaucgugcagucc

SEQ ID NO: 1236 - RNA, 19 nt, Artificial Sequence
  Description of Artificial Sequence: synthetic
uguggacgccuucgccuuc

SEQ ID NO: 1237 - RNA, 19 nt, Artificial Sequence
  Description of Artificial Sequence: synthetic
ucgccuuccacgagguugc

SEQ ID NO: 1238 - RNA, 19 nt, Artificial Sequence
  Description of Artificial Sequence: synthetic
accaagcacagcccgcguc

SEQ ID NO: 1239 - RNA, 19 nt, Artificial Sequence
  Description of Artificial Sequence: synthetic
uaccaagcacagcccgcgu

SEQ ID NO: 1240 - RNA, 19 nt, Artificial Sequence
  Description of Artificial Sequence: synthetic
gggguccuggaggcugcac

SEQ ID NO: 1241 - RNA, 19 nt, Artificial Sequence
  Description of Artificial Sequence: synthetic
gggggguccuggaggcugc

SEQ ID NO: 1242 - RNA, 19 nt, Artificial Sequence
  Description of Artificial Sequence: synthetic
cgccuuccacgagguugcg

SEQ ID NO: 1243 - RNA, 19 nt, Artificial Sequence
  Description of Artificial Sequence: synthetic
uccuggaggcugcacgaca

SEQ ID NO: 1244 - RNA, 19 nt, Artificial Sequence
  Description of Artificial Sequence: synthetic
ucaucauaucccaagccau

SEQ ID NO: 1245 - RNA, 19 nt, Artificial Sequence
  Description of Artificial Sequence: synthetic
uucaucaucauaucccaag

SEQ ID NO: 1246 - RNA, 19 nt, Artificial Sequence
  Description of Artificial Sequence: synthetic
gccauagaggggccaaggg

SEQ ID NO: 1247 - RNA, 19 nt, Artificial Sequence
  Description of Artificial Sequence: synthetic
aucaucauaucccaagcca

SEQ ID NO: 1248 - RNA, 19 nt, Artificial Sequence
  Description of Artificial Sequence: synthetic
cgguucauccacugcacag

SEQ ID NO: 1249 - RNA, 19 nt, Artificial Sequence
  Description of Artificial Sequence: synthetic
caagcacagcccgcgucau

SEQ ID NO: 1250 - RNA, 19 nt, Artificial Sequence
  Description of Artificial Sequence: synthetic
ucaucaucauaucccaagc

SEQ ID NO: 1251 - RNA, 19 nt, Artificial Sequence
  Description of Artificial Sequence: synthetic
aagcacagcccgcgucaua

SEQ ID NO: 1252 - RNA, 19 nt, Artificial Sequence
  Description of Artificial Sequence: synthetic
ccaagcacagcccgcguca

SEQ ID NO: 1253 - RNA, 19 nt, Artificial Sequence
  Description of Artificial Sequence: synthetic
caucaucauaucccaagcc

SEQ ID NO: 1254 - RNA, 19 nt, Artificial Sequence
  Description of Artificial Sequence: synthetic
ccgguucauccacugcaca

SEQ ID NO: 1255 - RNA, 19 nt, Artificial Sequence
  Description of Artificial Sequence: synthetic
gguucauccacugcacagc

SEQ ID NO: 1256 - RNA, 19 nt, Artificial Sequence
  Description of Artificial Sequence: synthetic
uuacugcccaguugaagag

SEQ ID NO: 1257 - RNA, 19 nt, Artificial Sequence
  Description of Artificial Sequence: synthetic
guugucgccuuccacgagg

SEQ ID NO: 1258 - RNA, 19 nt, Artificial Sequence
  Description of Artificial Sequence: synthetic
cgacugucugggugacaca

SEQ ID NO: 1259 - RNA, 19 nt, Artificial Sequence
  Description of Artificial Sequence: synthetic
cuguugcauaguucacgcc

SEQ ID NO: 1260 - RNA, 19 nt, Artificial Sequence
  Description of Artificial Sequence: synthetic
uguugcauaguucacgccg

SEQ ID NO: 1261 - RNA, 19 nt, Artificial Sequence
  Description of Artificial Sequence: synthetic
ucgacugucugggugacac

SEQ ID NO: 1262 - RNA, 19 nt, Artificial Sequence
  Description of Artificial Sequence: synthetic
uacugcccaguugaagagg

SEQ ID NO: 1263 - RNA, 19 nt, Artificial Sequence
  Description of Artificial Sequence: synthetic
uagguugucgccuuccacg

SEQ ID NO: 1264 - RNA, 19 nt, Artificial Sequence
  Description of Artificial Sequence: synthetic
agguugucgccuuccacga

SEQ ID NO: 1265 - RNA, 19 nt, Artificial Sequence
  Description of Artificial Sequence: synthetic
uggggccccaacuaggccg

SEQ ID NO: 1266 - RNA, 19 nt, Artificial Sequence
  Description of Artificial Sequence: synthetic
ucggaagucuuccuagucg

SEQ ID NO: 1267 - RNA, 19 nt, Artificial Sequence
  Description of Artificial Sequence: synthetic
aucgaugaccuuacccaaa

SEQ ID NO: 1268 - RNA, 19 nt, Artificial Sequence
  Description of Artificial Sequence: synthetic
auagguugucgccuuccac

SEQ ID NO: 1269 - RNA, 19 nt, Artificial Sequence
  Description of Artificial Sequence: synthetic
uugucgccuuccacgaggu

SEQ ID NO: 1270 - RNA, 19 nt, Artificial Sequence
  Description of Artificial Sequence: synthetic
cggaagucuuccuagucgc

SEQ ID NO: 1271 - RNA, 19 nt, Artificial Sequence
  Description of Artificial Sequence: synthetic
guccuggaggcugcacgac

SEQ ID NO: 1272 - RNA, 19 nt, Artificial Sequence
  Description of Artificial Sequence: synthetic
ccgcucggaagucuuccua

SEQ ID NO: 1273 - RNA, 19 nt, Artificial Sequence
  Description of Artificial Sequence: synthetic
guugcauaguucacgccgu

SEQ ID NO: 1274 - RNA, 19 nt, Artificial Sequence
  Description of Artificial Sequence: synthetic
gguugucgccuuccacgag

SEQ ID NO: 1275 - RNA, 19 nt, Artificial Sequence
  Description of Artificial Sequence: synthetic
cuuccacgagguugcgacc

SEQ ID NO: 1276 - RNA, 19 nt, Artificial Sequence
  Description of Artificial Sequence: synthetic
uuccacgagguugcgaccg

SEQ ID NO: 1277 - RNA, 19 nt, Artificial Sequence
  Description of Artificial Sequence: synthetic
agucuuccuagucgcgcgc

SEQ ID NO: 1278 - RNA, 19 nt, Artificial Sequence
  Description of Artificial Sequence: synthetic
uugcauaguucacgccguc

SEQ ID NO: 1279 - RNA, 19 nt, Artificial Sequence
  Description of Artificial Sequence: synthetic
cucacaggggagugaucua

SEQ ID NO: 1280 - RNA, 19 nt, Artificial Sequence
  Description of Artificial Sequence: synthetic
ccacgagguugcgaccgcu

SEQ ID NO: 1281 - RNA, 19 nt, Artificial Sequence
  Description of Artificial Sequence: synthetic
gauagguugucgccuucca

SEQ ID NO: 1282 - RNA, 19 nt, Artificial Sequence
  Description of Artificial Sequence: synthetic
aagucuuccuagucgcgcg

SEQ ID NO: 1283 - RNA, 19 nt, Artificial Sequence
  Description of Artificial Sequence: synthetic
cgcucggaagucuuccuag

SEQ ID NO: 1284 - RNA, 19 nt, Artificial Sequence
  Description of Artificial Sequence: synthetic
ucuuccuagucgcgcgcac

SEQ ID NO: 1285 - RNA, 19 nt, Artificial Sequence
  Description of Artificial Sequence: synthetic
ccucacaggggagugaucu

SEQ ID NO: 1286 - RNA, 19 nt, Artificial Sequence
  Description of Artificial Sequence: synthetic
gucuuccuagucgcgcgca

SEQ ID NO: 1287 - RNA, 19 nt, Artificial Sequence
  Description of Artificial Sequence: synthetic
ucacaggggagugaucuau

SEQ ID NO: 1288 - RNA, 19 nt, Artificial Sequence
  Description of Artificial Sequence: synthetic
cacgagguugcgaccgcuc

SEQ ID NO: 1289 - RNA, 19 nt, Artificial Sequence
  Description of Artificial Sequence: synthetic
guuggagcagucguucgug

SEQ ID NO: 1290 - RNA, 19 nt, Artificial Sequence
  Description of Artificial Sequence: synthetic
cgucggcaaggaacuugcc

SEQ ID NO: 1291 - RNA, 19 nt, Artificial Sequence
  Description of Artificial Sequence: synthetic
gguccuggaggcugcacga

SEQ ID NO: 1292 - RNA, 19 nt, Artificial Sequence
  Description of Artificial Sequence: synthetic
uggagcagucguucgugac

SEQ ID NO: 1293 - RNA, 19 nt, Artificial Sequence
  Description of Artificial Sequence: synthetic
uccacgagguugcgaccgc

SEQ ID NO: 1294 - RNA, 19 nt, Artificial Sequence
  Description of Artificial Sequence: synthetic
gaagucuuccuagucgcgc

SEQ ID NO: 1295 - RNA, 19 nt, Artificial Sequence
  Description of Artificial Sequence: synthetic
gcacagcccgcgucauagc

SEQ ID NO: 1296 - RNA, 19 nt, Artificial Sequence
  Description of Artificial Sequence: synthetic
uuggagcagucguucguga

SEQ ID NO: 1297 - RNA, 19 nt, Artificial Sequence
  Description of Artificial Sequence: synthetic
gccuuccacgagguugcga

SEQ ID NO: 1298 - RNA, 19 nt, Artificial Sequence
  Description of Artificial Sequence: synthetic
ggguccuggaggcugcacg

SEQ ID NO: 1299 - RNA, 19 nt, Artificial Sequence
  Description of Artificial Sequence: synthetic
ccuuccacgagguugcgac

SEQ ID NO: 1300 - RNA, 19 nt, Artificial Sequence
  Description of Artificial Sequence: synthetic
gcucggaagucuuccuagu

SEQ ID NO: 1301 - RNA, 19 nt, Artificial Sequence
  Description of Artificial Sequence: synthetic
ggaagucuuccuagucgcg

SEQ ID NO: 1302 - RNA, 19 nt, Artificial Sequence
  Description of Artificial Sequence: synthetic
uccacaugugcuucgccca

SEQ ID NO: 1303 - RNA, 19 nt, Artificial Sequence
  Description of Artificial Sequence: synthetic
cauggaauaguaggcaagg

SEQ ID NO: 1304 - RNA, 19 nt, Artificial Sequence
  Description of Artificial Sequence: synthetic
accccaaguuuccugaggc

SEQ ID NO: 1305 - RNA, 19 nt, Artificial Sequence
  Description of Artificial Sequence: synthetic
cacagcccgcgucauagca

SEQ ID NO: 1306 - RNA, 19 nt, Artificial Sequence
  Description of Artificial Sequence: synthetic
guagcgguggcgagcacga

SEQ ID NO: 1307 - RNA, 19 nt, Artificial Sequence
  Description of Artificial Sequence: synthetic
ccccaaguuuccugaggca

SEQ ID NO: 1308 - RNA, 19 nt, Artificial Sequence
  Description of Artificial Sequence: synthetic
cggggucgggcacgagaca

SEQ ID NO: 1309 - RNA, 19 nt, Artificial Sequence
  Description of Artificial Sequence: synthetic
cccaucuccugccgccaca

SEQ ID NO: 1310 - RNA, 19 nt, Artificial Sequence
  Description of Artificial Sequence: synthetic
uagcgguggcgagcacgac

SEQ ID NO: 1311 - RNA, 19 nt, Artificial Sequence
  Description of Artificial Sequence: synthetic
ccgucacguaguggaaauc

SEQ ID NO: 1312 - RNA, 19 nt, Artificial Sequence
  Description of Artificial Sequence: synthetic
ggaauaguaggcaaggccc

SEQ ID NO: 1313 - RNA, 19 nt, Artificial Sequence
  Description of Artificial Sequence: synthetic
auggaauaguaggcaaggc

SEQ ID NO: 1314 - RNA, 19 nt, Artificial Sequence
  Description of Artificial Sequence: synthetic
cucggaagucuuccuaguc

SEQ ID NO: 1315 - RNA, 19 nt, Artificial Sequence
  Description of Artificial Sequence: synthetic
ugauauaugucucccccgc

SEQ ID NO: 1316 - RNA, 19 nt, Artificial Sequence
  Description of Artificial Sequence: synthetic
acgagguugcgaccgcucg

SEQ ID NO: 1317 - RNA, 19 nt, Artificial Sequence
  Description of Artificial Sequence: synthetic
uggaauaguaggcaaggcc

SEQ ID NO: 1318 - RNA, 19 nt, Artificial Sequence
  Description of Artificial Sequence: synthetic
cccgucacguaguggaaau

SEQ ID NO: 1319 - RNA, 19 nt, Artificial Sequence
  Description of Artificial Sequence: synthetic
gcccgggaacuugacgucc

SEQ ID NO: 1320 - RNA, 19 nt, Artificial Sequence
  Description of Artificial Sequence: synthetic
agcccgcgucauagcacuc

SEQ ID NO: 1321 - RNA, 19 nt, Artificial Sequence
  Description of Artificial Sequence: synthetic
cgcccgggaacuugacguc

SEQ ID NO: 1322 - RNA, 19 nt, Artificial Sequence
  Description of Artificial Sequence: synthetic
gaccaagacccgucgcuga

SEQ ID NO: 1323 - RNA, 19 nt, Artificial Sequence
  Description of Artificial Sequence: synthetic
ccaccgcccgggaacuuga

SEQ ID NO: 1324 - RNA, 19 nt, Artificial Sequence
  Description of Artificial Sequence: synthetic
uucgccuucaucuccuuga

SEQ ID NO: 1325 - RNA, 19 nt, Artificial Sequence
  Description of Artificial Sequence: synthetic
ggcgagccuuggggauagg

SEQ ID NO: 1326 - RNA, 19 nt, Artificial Sequence
  Description of Artificial Sequence: synthetic
ugaucugagguaggucaag

SEQ ID NO: 1327 - RNA, 19 nt, Artificial Sequence
  Description of Artificial Sequence: synthetic
gcccgucacguaguggaaa

SEQ ID NO: 1328 - RNA, 19 nt, Artificial Sequence
  Description of Artificial Sequence: synthetic
cagcccgcgucauagcacu

SEQ ID NO: 1329 - RNA, 19 nt, Artificial Sequence
  Description of Artificial Sequence: synthetic
ccgcccgggaacuugacgu

SEQ ID NO: 1330 - RNA, 19 nt, Artificial Sequence
  Description of Artificial Sequence: synthetic
cuggcccgaugucuccaga

SEQ ID NO: 1331 - RNA, 19 nt, Artificial Sequence
  Description of Artificial Sequence: synthetic
uuccacaugugcuucgccc

SEQ ID NO: 1332 - RNA, 19 nt, Artificial Sequence
  Description of Artificial Sequence: synthetic
augaucugagguaggucaa

SEQ ID NO: 1333 - RNA, 19 nt, Artificial Sequence
  Description of Artificial Sequence: synthetic
uccagccgucuccgcuugg

SEQ ID NO: 1334 - RNA, 19 nt, Artificial Sequence
  Description of Artificial Sequence: synthetic
ccagccgucuccgcuuggu

SEQ ID NO: 1335 - RNA, 19 nt, Artificial Sequence
  Description of Artificial Sequence: synthetic
cugaggcaugaagccaccc

SEQ ID NO: 1336 - RNA, 19 nt, Artificial Sequence
  Description of Artificial Sequence: synthetic
caccgcccgggaacuugac

SEQ ID NO: 1337 - RNA, 19 nt, Artificial Sequence
  Description of Artificial Sequence: synthetic
ucgccuucaucuccuugag

SEQ ID NO: 1338 - RNA, 19 nt, Artificial Sequence
  Description of Artificial Sequence: synthetic
cagccgucuccgcuugguc

SEQ ID NO: 1339 - RNA, 19 nt, Artificial Sequence
  Description of Artificial Sequence: synthetic
ugguugagcccgaccugga

SEQ ID NO: 1340 - RNA, 19 nt, Artificial Sequence
  Description of Artificial Sequence: synthetic
gaggaagauagagaaagag

SEQ ID NO: 1341 - RNA, 19 nt, Artificial Sequence
  Description of Artificial Sequence: synthetic
uggcccgaugucuccagac

SEQ ID NO: 1342 - RNA, 19 nt, Artificial Sequence
  Description of Artificial Sequence: synthetic
ucgggggccaagucacaac

SEQ ID NO: 1343 - RNA, 19 nt, Artificial Sequence
  Description of Artificial Sequence: synthetic
uuggacuggagccaggucu

SEQ ID NO: 1344 - RNA, 19 nt, Artificial Sequence
  Description of Artificial Sequence: synthetic
ccauggaauaguaggcaag

SEQ ID NO: 1345 - RNA, 19 nt, Artificial Sequence
  Description of Artificial Sequence: synthetic
uagagaaagagcaaccggg

SEQ ID NO: 1346 - RNA, 19 nt, Artificial Sequence
  Description of Artificial Sequence: synthetic
aagaggaagauagagaaag

SEQ ID NO: 1347 - RNA, 19 nt, Artificial Sequence
  Description of Artificial Sequence: synthetic
ugaggcaugaagccacccu

SEQ ID NO: 1348 - RNA, 19 nt, Artificial Sequence
  Description of Artificial Sequence: synthetic
uggacuggagccaggucuu

SEQ ID NO: 1349 - RNA, 19 nt, Artificial Sequence
  Description of Artificial Sequence: synthetic
auagagaaagagcaaccgg

SEQ ID NO: 1350 - RNA, 19 nt, Artificial Sequence
  Description of Artificial Sequence: synthetic
gauagagaaagagcaaccg

SEQ ID NO: 1351 - RNA, 19 nt, Artificial Sequence
  Description of Artificial Sequence: synthetic
acguaguggaaauccccca

SEQ ID NO: 1352 - RNA, 19 nt, Artificial Sequence
  Description of Artificial Sequence: synthetic
gagcagucguucgugacau

SEQ ID NO: 1353 - RNA, 19 nt, Artificial Sequence
  Description of Artificial Sequence: synthetic
guggggccccaacuaggcc

SEQ ID NO: 1354 - RNA, 19 nt, Artificial Sequence
  Description of Artificial Sequence: synthetic
gccgucuccgcuuggucca

SEQ ID NO: 1355 - RNA, 19 nt, Artificial Sequence
  Description of Artificial Sequence: synthetic
gguugagcccgaccuggaa

SEQ ID NO: 1356 - RNA, 19 nt, Artificial Sequence
  Description of Artificial Sequence: synthetic
accaggaacucgacccgcu

SEQ ID NO: 1357 - RNA, 19 nt, Artificial Sequence
  Description of Artificial Sequence: synthetic
cuucgccuucaucuccuug

SEQ ID NO: 1358 - RNA, 19 nt, Artificial Sequence
  Description of Artificial Sequence: synthetic
agcagucguucgugacaug

SEQ ID NO: 1359 - RNA, 19 nt, Artificial Sequence
  Description of Artificial Sequence: synthetic
ccaggaacucgacccgcug

SEQ ID NO: 1360 - RNA, 19 nt, Artificial Sequence
  Description of Artificial Sequence: synthetic
ugcccgucacguaguggaa

SEQ ID NO: 1361 - RNA, 19 nt, Artificial Sequence
  Description of Artificial Sequence: synthetic
gaggcaugaagccacccua

SEQ ID NO: 1362 - RNA, 19 nt, Artificial Sequence
  Description of Artificial Sequence: synthetic
agcaucgugcaguccugga

SEQ ID NO: 1363 - RNA, 19 nt, Artificial Sequence
  Description of Artificial Sequence: synthetic
augcccgucacguagugga

SEQ ID NO: 1364 - RNA, 19 nt, Artificial Sequence
  Description of Artificial Sequence: synthetic
ggcaugaagccacccuauu

SEQ ID NO: 1365 - RNA, 19 nt, Artificial Sequence
  Description of Artificial Sequence: synthetic
ucauagccuccgugaagac

SEQ ID NO: 1366 - RNA, 19 nt, Artificial Sequence
  Description of Artificial Sequence: synthetic
aggcaugaagccacccuau

SEQ ID NO: 1367 - RNA, 19 nt, Artificial Sequence
  Description of Artificial Sequence: synthetic
gucauagccuccgugaaga

SEQ ID NO: 1368 - RNA, 19 nt, Artificial Sequence
  Description of Artificial Sequence: synthetic
cccaaguuuccugaggcau

SEQ ID NO: 1369 - RNA, 19 nt, Artificial Sequence
  Description of Artificial Sequence: synthetic
uccuugagcacgucccggu

SEQ ID NO: 1370 - RNA, 19 nt, Artificial Sequence
  Description of Artificial Sequence: synthetic
ucauccacugcacagcccc

SEQ ID NO: 1371 - RNA, 19 nt, Artificial Sequence
  Description of Artificial Sequence: synthetic
ucgugcaguccuggagcuu

SEQ ID NO: 1372 - RNA, 19 nt, Artificial Sequence
  Description of Artificial Sequence: synthetic
caucgugcaguccuggagc

SEQ ID NO: 1373 - RNA, 19 nt, Artificial Sequence
  Description of Artificial Sequence: synthetic
ccuugagcacgucccggua

SEQ ID NO: 1374 - RNA, 19 nt, Artificial Sequence
  Description of Artificial Sequence: synthetic
uucauccacugcacagccc

SEQ ID NO: 1375 - RNA, 19 nt, Artificial Sequence
  Description of Artificial Sequence: synthetic
accgcccgggaacuugacg

SEQ ID NO: 1376 - RNA, 19 nt, Artificial Sequence
  Description of Artificial Sequence: synthetic
caugaagccacccuauuga

SEQ ID NO: 1377 - RNA, 19 nt, Artificial Sequence
  Description of Artificial Sequence: synthetic
cauagccuccgugaagacu

SEQ ID NO: 1378 - RNA, 19 nt, Artificial Sequence
  Description of Artificial Sequence: synthetic
agccgucuccgcuuggucc

SEQ ID NO: 1379 - RNA, 19 nt, Artificial Sequence
  Description of Artificial Sequence: synthetic
aggagcuuggacuggagcc

SEQ ID NO: 1380 - RNA, 19 nt, Artificial Sequence
  Description of Artificial Sequence: synthetic
guucauccacugcacagcc

SEQ ID NO: 1381 - RNA, 19 nt, Artificial Sequence
  Description of Artificial Sequence: synthetic
gcaucgugcaguccuggag

SEQ ID NO: 1382 - RNA, 19 nt, Artificial Sequence
  Description of Artificial Sequence: synthetic
auagccuccgugaagacuc

SEQ ID NO: 1383 - RNA, 19 nt, Artificial Sequence
  Description of Artificial Sequence: synthetic
ggagcuuggacuggagcca

SEQ ID NO: 1384 - RNA, 19 nt, Artificial Sequence
  Description of Artificial Sequence: synthetic
ucacguaguggaaaucccc

SEQ ID NO: 1385 - RNA, 19 nt, Artificial Sequence
  Description of Artificial Sequence: synthetic
ccaaguuuccugaggcaug

SEQ ID NO: 1386 - RNA, 19 nt, Artificial Sequence
  Description of Artificial Sequence: synthetic
augaagccacccuauugau

SEQ ID NO: 1387 - RNA, 19 nt, Artificial Sequence
  Description of Artificial Sequence: synthetic
aauaguaggcaaggcccgc

SEQ ID NO: 1388 - RNA, 19 nt, Artificial Sequence
  Description of Artificial Sequence: synthetic
cuccuugagcacgucccgg

SEQ ID NO: 1389 - RNA, 19 nt, Artificial Sequence
  Description of Artificial Sequence: synthetic
gcccaguuccccaccaugg

SEQ ID NO: 1390 - RNA, 19 nt, Artificial Sequence
  Description of Artificial Sequence: synthetic
gcaugaagccacccuauug

SEQ ID NO: 1391 - RNA, 19 nt, Artificial Sequence
  Description of Artificial Sequence: synthetic
aucgugcaguccuggagcu

SEQ ID NO: 1392 - RNA, 19 nt, Artificial Sequence
  Description of Artificial Sequence: synthetic
gaauaguaggcaaggcccg

SEQ ID NO: 1393 - RNA, 23 nt, Artificial Sequence
  Description of Artificial Sequence: synthetic
gguccuuucuuggaucaacccgc

SEQ ID NO: 1394 - RNA, 23 nt, Artificial Sequence
  Description of Artificial Sequence: synthetic
ugccccgggaggucucguagacc

SEQ ID NO: 1395 - RNA, 23 nt, Artificial Sequence
  Description of Artificial Sequence: synthetic
ugcggaaccggugaguacaccgg

SEQ ID NO: 1396 - RNA, 23 nt, Artificial Sequence
  Description of Artificial Sequence: synthetic
gcggaaccggugaguacaccgga

SEQ ID NO: 1397 - RNA, 23 nt, Artificial Sequence
  Description of Artificial Sequence: synthetic
ccuugugguacugccugauaggg

SEQ ID NO: 1398 - RNA, 23 nt, Artificial Sequence
  Description of Artificial Sequence: synthetic
cuugugguacugccugauagggu

SEQ ID NO: 1399 - RNA, 23 nt, Artificial Sequence
  Description of Artificial Sequence: synthetic
uugugguacugccugauagggug

SEQ ID NO: 1400 - RNA, 23 nt, Artificial Sequence
  Description of Artificial Sequence: synthetic
gugccccgggaggucucguagac

SEQ ID NO: 1401 - RNA, 23 nt, Artificial Sequence
  Description of Artificial Sequence: synthetic
auaguggucugcggaaccgguga

SEQ ID NO: 1402 - RNA, 23 nt, Artificial Sequence
  Description of Artificial Sequence: synthetic
gucugcggaaccggugaguacac

SEQ ID NO: 1403 - RNA, 23 nt, Artificial Sequence
  Description of Artificial Sequence: synthetic
gccuugugguacugccugauagg

SEQ ID NO: 1404 - RNA, 23 nt, Artificial Sequence
  Description of Artificial Sequence: synthetic
ugugguacugccugauagggugc

SEQ ID NO: 1405 - RNA, 23 nt, Artificial Sequence
  Description of Artificial Sequence: synthetic
gugguacugccugauagggugcu

SEQ ID NO: 1406 - RNA, 23 nt, Artificial Sequence
  Description of Artificial Sequence: synthetic
ugguacugccugauagggugcuu

SEQ ID NO: 1407 - RNA, 23 nt, Artificial Sequence
  Description of Artificial Sequence: synthetic
gguacugccugauagggugcuug

SEQ ID NO: 1408 - RNA, 23 nt, Artificial Sequence
  Description of Artificial Sequence: synthetic
uacugccugauagggugcuugcg

SEQ ID NO: 1409 - RNA, 23 nt, Artificial Sequence
  Description of Artificial Sequence: synthetic
acugccugauagggugcuugcga

SEQ ID NO: 1410 - RNA, 23 nt, Artificial Sequence
  Description of Artificial Sequence: synthetic
ugccugauagggugcuugcgagu

SEQ ID NO: 1411 - RNA, 23 nt, Artificial Sequence
  Description of Artificial Sequence: synthetic
cugauagggugcuugcgagugcc

SEQ ID NO: 1412 - RNA, 23 nt, Artificial Sequence
  Description of Artificial Sequence: synthetic
aaaggccuugugguacugccuga

SEQ ID NO: 1413 - RNA, 23 nt, Artificial Sequence
  Description of Artificial Sequence: synthetic
ggguccuuucuuggaucaacccg

SEQ ID NO: 1414 - RNA, 23 nt, Artificial Sequence
  Description of Artificial Sequence: synthetic
cggguccuuucuuggaucaaccc

SEQ ID NO: 1415 - RNA, 23 nt, Artificial Sequence
  Description of Artificial Sequence: synthetic
gaccggguccuuucuuggaucaa

SEQ ID NO: 1416 - RNA, 23 nt, Artificial Sequence
  Description of Artificial Sequence: synthetic
gccccgggaggucucguagaccg

SEQ ID NO: 1417 - RNA, 23 nt, Artificial Sequence
  Description of Artificial Sequence: synthetic
ccccgggaggucucguagaccgu

SEQ ID NO: 1418 - RNA, 23 nt, Artificial Sequence
  Description of Artificial Sequence: synthetic
cccgggaggucucguagaccgug

SEQ ID NO: 1419 - RNA, 23 nt, Artificial Sequence
  Description of Artificial Sequence: synthetic
ccgggaggucucguagaccgugc

SEQ ID NO: 1420 - RNA, 23 nt, Artificial Sequence
  Description of Artificial Sequence: synthetic
ucccgggagagccauaguggucu

SEQ ID NO: 1421 - RNA, 23 nt, Artificial Sequence
  Description of Artificial Sequence: synthetic
cccgggagagccauaguggucug

SEQ ID NO: 1422 - RNA, 23 nt, Artificial Sequence
  Description of Artificial Sequence: synthetic
ccgggagagccauaguggucugc

SEQ ID NO: 1423 - RNA, 23 nt, Artificial Sequence
  Description of Artificial Sequence: synthetic
uaguggucugcggaaccggugag

SEQ ID NO: 1424 - RNA, 23 nt, Artificial Sequence
  Description of Artificial Sequence: synthetic
aguggucugcggaaccggugagu

SEQ ID NO: 1425 - RNA, 23 nt, Artificial Sequence
  Description of Artificial Sequence: synthetic
guggucugcggaaccggugagua

SEQ ID NO: 1426 - RNA, 23 nt, Artificial Sequence
  Description of Artificial Sequence: synthetic
uggucugcggaaccggugaguac

SEQ ID NO: 1427 - RNA, 23 nt, Artificial Sequence
  Description of Artificial Sequence: synthetic
ggucugcggaaccggugaguaca

SEQ ID NO: 1428 - RNA, 23 nt, Artificial Sequence
  Description of Artificial Sequence: synthetic
ucugcggaaccggugaguacacc

SEQ ID NO: 1429 - RNA, 23 nt, Artificial Sequence
  Description of Artificial Sequence: synthetic
cugcggaaccggugaguacaccg

SEQ ID NO: 1430 - RNA, 23 nt, Artificial Sequence
  Description of Artificial Sequence: synthetic
cggaaccggugaguacaccggaa

SEQ ID NO: 1431 - RNA, 23 nt, Artificial Sequence
  Description of Artificial Sequence: synthetic
ggaaccggugaguacaccggaau

SEQ ID NO: 1432 - RNA, 23 nt, Artificial Sequence
  Description of Artificial Sequence: synthetic
gaaccggugaguacaccggaauu

SEQ ID NO: 1433 - RNA, 23 nt, Artificial Sequence
  Description of Artificial Sequence: synthetic
aaccggugaguacaccggaauug

SEQ ID NO: 1434 - RNA, 23 nt, Artificial Sequence
  Description of Artificial Sequence: synthetic
ucgcgaaaggccuugugguacug

SEQ ID NO: 1435 - RNA, 23 nt, Artificial Sequence
  Description of Artificial Sequence: synthetic
cgcgaaaggccuugugguacugc

SEQ ID NO: 1436 - RNA, 23 nt, Artificial Sequence
  Description of Artificial Sequence: synthetic
gcgaaaggccuugugguacugcc

SEQ ID NO: 1437 - RNA, 23 nt, Artificial Sequence
  Description of Artificial Sequence: synthetic
cgaaaggccuugugguacugccu

SEQ ID NO: 1438 - RNA, 23 nt, Artificial Sequence
  Description of Artificial Sequence: synthetic
gaaaggccuugugguacugccug

SEQ ID NO: 1439 - RNA, 23 nt, Artificial Sequence
  Description of Artificial Sequence: synthetic
aaggccuugugguacugccugau

SEQ ID NO: 1440 - RNA, 23 nt, Artificial Sequence
  Description of Artificial Sequence: synthetic
aggccuugugguacugccugaua

SEQ ID NO: 1441 - RNA, 23 nt, Artificial Sequence
  Description of Artificial Sequence: synthetic
ggccuugugguacugccugauag

SEQ ID NO: 1442 - RNA, 23 nt, Artificial Sequence
  Description of Artificial Sequence: synthetic
guacugccugauagggugcuugc

SEQ ID NO: 1443 - RNA, 23 nt, Artificial Sequence
  Description of Artificial Sequence: synthetic
cugccugauagggugcuugcgag

SEQ ID NO: 1444 - RNA, 23 nt, Artificial Sequence
  Description of Artificial Sequence: synthetic
gccugauagggugcuugcgagug

SEQ ID NO: 1445 - RNA, 23 nt, Artificial Sequence
  Description of Artificial Sequence: synthetic
ccugauagggugcuugcgagugc

SEQ ID NO: 1446 - RNA, 23 nt, Artificial Sequence
  Description of Artificial Sequence: synthetic
ugauagggugcuugcgagugccc

SEQ ID NO: 1447 - RNA, 23 nt, Artificial Sequence
  Description of Artificial Sequence: synthetic
gauagggugcuugcgagugcccc

SEQ ID NO: 1448 - RNA, 23 nt, Artificial Sequence
  Description of Artificial Sequence: synthetic
uagggugcuugcgagugccccgg

SEQ ID NO: 1449 - RNA, 23 nt, Artificial Sequence
  Description of Artificial Sequence: synthetic
agggugcuugcgagugccccggg

SEQ ID NO: 1450 - RNA, 23 nt, Artificial Sequence
  Description of Artificial Sequence: synthetic
gugcuugcgagugccccgggagg

SEQ ID NO: 1451 - RNA, 23 nt, Artificial Sequence
  Description of Artificial Sequence: synthetic
ugcuugcgagugccccgggaggu

SEQ ID NO: 1452 - RNA, 23 nt, Artificial Sequence
  Description of Artificial Sequence: synthetic
gcuugcgagugccccgggagguc

SEQ ID NO: 1453 - RNA, 23 nt, Artificial Sequence
  Description of Artificial Sequence: synthetic
cuugcgagugccccgggaggucu

SEQ ID NO: 1454 - RNA, 23 nt, Artificial Sequence
  Description of Artificial Sequence: synthetic
uugcgagugccccgggaggucuc

SEQ ID NO: 1455 - RNA, 23 nt, Artificial Sequence
  Description of Artificial Sequence: synthetic
ugcgagugccccgggaggucucg

SEQ ID NO: 1456 - RNA, 23 nt, Artificial Sequence
  Description of Artificial Sequence: synthetic
gcgagugccccgggaggucucgu

SEQ ID NO: 1457 - RNA, 23 nt, Artificial Sequence
  Description of Artificial Sequence: synthetic
gagugccccgggaggucucguag

SEQ ID NO: 1458 - RNA, 23 nt, Artificial Sequence
  Description of Artificial Sequence: synthetic
agugccccgggaggucucguaga

SEQ ID NO: 1459 - RNA, 23 nt, Artificial Sequence
  Description of Artificial Sequence: synthetic
cgggaggucucguagaccgugca

SEQ ID NO: 1460 - RNA, 23 nt, Artificial Sequence
  Description of Artificial Sequence: synthetic
uagccauggcguuaguaugagug

SEQ ID NO: 1461 - RNA, 23 nt, Artificial Sequence
  Description of Artificial Sequence: synthetic
cccucccgggagagccauagugg

SEQ ID NO: 1462 - RNA, 46 nt, Artificial Sequence
  Description of Artificial Sequence: synthetic
ccccgggaggucucguagaccguucgcgaaaggccuugugguacug

SEQ ID NO: 1463 - RNA, 46 nt, Artificial Sequence
  Description of Artificial Sequence: synthetic
ccccgggaggucucguagaccguugauagggugcuugcgagugccc

SEQ ID NO: 1464 - RNA, 46 nt, Artificial Sequence
  Description of Artificial Sequence: synthetic
ugauagggugcuugcgagugcccucgcgaaaggccuugugguacug

SEQ ID NO: 1465 - RNA, 46 nt, Artificial Sequence
  Description of Artificial Sequence: synthetic
ccccgggaggucucguagaccgugccugauagggugcuugcgagug

SEQ ID NO: 1466 - RNA, 46 nt, Artificial Sequence
  Description of Artificial Sequence: synthetic
gccugauagggugcuugcgagugucgcgaaaggccuugugguacug

SEQ ID NO: 1467 - RNA, 21 nt, Artificial Sequence
  Description of Artificial Sequence: synthetic
  misc_feature (1)..(1): 5'-3 attached terminal deoxyabasic moiety
  misc_feature (21)..(21): 3'-3 attached terminal deoxyabasic moiety
gguccuuucuuggaucaaccc

SEQ ID NO: 1468 - RNA, 21 nt, Artificial Sequence
  Description of Artificial Sequence: synthetic
  misc_feature (1)..(1): 5'-3 attached terminal deoxyabasic moiety
  misc_feature (21)..(21): 3'-3 attached terminal deoxyabasic moiety
ggguugauccaagaaaggacc

SEQ ID NO: 1469 - RNA, 21 nt, Artificial Sequence
  Description of Artificial Sequence: synthetic
  misc_feature (1)..(1): 5'-3 attached terminal deoxyabasic moiety
  misc_feature (21)..(21): 3'-3 attached terminal deoxyabasic moiety
cccaacuagguucuuuccugg

SEQ ID NO: 1470 - RNA, 21 nt, Artificial Sequence
  Description of Artificial Sequence: synthetic
  misc_feature (1)..(1): 5'-3 attached terminal deoxyabasic moiety
  misc_feature (21)..(21): 3'-3 attached terminal deoxyabasic moiety
ccaggaaagaaccuaguuggg

SEQ ID NO: 1471 - RNA, 23 nt, Artificial Sequence
  Description of Artificial Sequence: synthetic
gguccuuucuuggaucaacccuu

SEQ ID NO: 1472 - RNA, 23 nt, Artificial Sequence
  Description of Artificial Sequence: synthetic
ggguugauccaagaaaggaccuu

SEQ ID NO: 1473 - RNA, 23 nt, Artificial Sequence
  Description of Artificial Sequence: synthetic
  misc_feature (1)..(1): 5'-3 attached terminal deoxyabasic moiety
  misc_feature (21)..(21): 3'-3 attached terminal deoxyabasic moiety
gguccuuucuuggaucaacccuu

SEQ ID NO: 1474 - RNA, 23 nt, Artificial Sequence
  Description of Artificial Sequence: synthetic
  misc_feature (1)..(1): 5'-3 attached terminal deoxyabasic moiety
  misc_feature (23)..(23): 3'-3 attached terminal deoxyabasic moiety
ggguugauccaagaaaggaccuu

SEQ ID NO: 1475 - DNA, 21 bp, Artificial Sequence
  Description of Artificial Sequence: synthetic
  misc_feature (1)..(19): ribonucleotide
ccccgggaggucucguagatt

SEQ ID NO: 1476 - DNA, 21 bp, Artificial Sequence
  Description of Artificial Sequence: synthetic
  misc_feature (1)..(19): ribonucleotide
cggaaccggugaguacacctt

SEQ ID NO: 1477 - DNA, 21 bp, Artificial Sequence
  Description of Artificial Sequence: synthetic
  misc_feature (1)..(19): ribonucleotide
gccccgggaggucucguagtt

SEQ ID NO: 1478 - DNA, 21 bp, Artificial Sequence
  Description of Artificial Sequence: synthetic
  misc_feature (1)..(19): ribonucleotide
ggaaccggugaguacaccgtt

SEQ ID NO: 1479 - DNA, 21 bp, Artificial Sequence
  Description of Artificial Sequence: synthetic
  misc_feature (1)..(19): ribonucleotide
gugguacugccugauagggtt

SEQ ID NO: 1480 - DNA, 21 bp, Artificial Sequence
  Description of Artificial Sequence: synthetic
  misc_feature (1)..(19): ribonucleotide
ugugguacugccugauaggtt

SEQ ID NO: 1481 - DNA, 21 bp, Artificial Sequence
  Description of Artificial Sequence: synthetic
  misc_feature (1)..(19): ribonucleotide
uugugguacugccugauagtt

SEQ ID NO: 1482 - DNA, 21 bp, Artificial Sequence
  Description of Artificial Sequence: synthetic
  misc_feature (1)..(19): ribonucleotide
ucuacgagaccucccggggtt

SEQ ID NO: 1483 - DNA, 21 bp, Artificial Sequence
  Description of Artificial Sequence: synthetic
  misc_feature (1)..(19): ribonucleotide
gguguacucaccgguuccgtt

SEQ ID NO: 1484 - DNA, 21 bp, Artificial Sequence
  Description of Artificial Sequence: synthetic
  misc_feature (1)..(19): ribonucleotide
cuacgagaccucccggggctt

SEQ ID NO: 1485 - DNA, 21 bp, Artificial Sequence
  Description of Artificial Sequence: synthetic
  misc_feature (1)..(19): ribonucleotide
cgguguacucaccgguucctt

SEQ ID NO: 1486 - DNA, 21 bp, Artificial Sequence
  Description of Artificial Sequence: synthetic
  misc_feature (1)..(19): ribonucleotide
cccuaucaggcaguaccactt

SEQ ID NO: 1487 - DNA, 21 bp, Artificial Sequence
  Description of Artificial Sequence: synthetic
  misc_feature (1)..(19): ribonucleotide
ccuaucaggcaguaccacatt

SEQ ID NO: 1488 - DNA, 21 bp, Artificial Sequence
  Description of Artificial Sequence: synthetic
  misc_feature (1)..(19): ribonucleotide
cuaucaggcaguaccacaatt

SEQ ID NO: 1489 - DNA, 21 bp, Artificial Sequence
  Description of Artificial Sequence: synthetic
  misc_feature (2)..(21): ribonucleotide
ttagaugcucuggagggcccc

SEQ ID NO: 1490 - DNA, 21 bp, Artificial Sequence
  Description of Artificial Sequence: synthetic
  misc_feature (2)..(21): ribonucleotide
ttccacaugaguggccaaggc

SEQ ID NO: 1491 - DNA, 21 bp, Artificial Sequence
  Description of Artificial Sequence: synthetic
  misc_feature (2)..(21): ribonucleotide
ttgaugcucuggagggccccg

SEQ ID NO: 1492 - DNA, 21 bp, Artificial Sequence
  Description of Artificial Sequence: synthetic
  misc_feature (2)..(21): ribonucleotide
ttgccacaugaguggccaagg

SEQ ID NO: 1493 - DNA, 21 bp, Artificial Sequence
  Description of Artificial Sequence: synthetic
  misc_feature (2)..(21): ribonucleotide
ttgggauaguccgucauggug

SEQ ID NO: 1494 - DNA, 21 bp, Artificial Sequence
  Description of Artificial Sequence: synthetic
  misc_feature (2)..(21): ribonucleotide
ttggauaguccgucauggugu

SEQ ID NO: 1495 - DNA, 21 bp, Artificial Sequence
  Description of Artificial Sequence: synthetic
  misc_feature (2)..(21): ribonucleotide
ttgauaguccgucaugguguu

SEQ ID NO: 1496 - DNA, 21 bp, Artificial Sequence
  Description of Artificial Sequence: synthetic
  misc_feature (2)..(21): ribonucleotide
ttggggcccuccagagcaucu

SEQ ID NO: 1497 - DNA, 21 bp, Artificial Sequence
  Description of Artificial Sequence: synthetic
  misc_feature (2)..(21): ribonucleotide
ttgccuuggccacucaugugg

SEQ ID NO: 1498 - DNA, 21 bp, Artificial Sequence
  Description of Artificial Sequence: synthetic
  misc_feature (2)..(21): ribonucleotide
ttcggggcccuccagagcauc

SEQ ID NO: 1499 - DNA, 21 bp, Artificial Sequence
  Description of Artificial Sequence: synthetic
  misc_feature (2)..(21): ribonucleotide
ttccuuggccacucauguggc

SEQ ID NO: 1500 - DNA, 21 bp, Artificial Sequence
  Description of Artificial Sequence: synthetic
  misc_feature (2)..(21): ribonucleotide
ttcaccaugacggacuauccc

SEQ ID NO: 1501 - DNA, 21 bp, Artificial Sequence
  Description of Artificial Sequence: synthetic
  misc_feature (2)..(21): ribonucleotide
ttacaccaugacggacuaucc

SEQ ID NO: 1502 - DNA, 21 bp, Artificial Sequence
  Description of Artificial Sequence: synthetic
  misc_feature (2)..(21): ribonucleotide
ttaacaccaugacggacuauc

SEQ ID NO: 1503 - RNA, 21 nt, Artificial Sequence
  Description of Artificial Sequence: synthetic
cggaaccggugaguacaccgg

SEQ ID NO: 1504 - RNA, 21 nt, Artificial Sequence
  Description of Artificial Sequence: synthetic
ggaaccggugaguacaccgga

SEQ ID NO: 1505 - RNA, 21 nt, Artificial Sequence
  Description of Artificial Sequence: synthetic
uugugguacugccugauaggg

SEQ ID NO: 1506 - RNA, 21 nt, Artificial Sequence
  Description of Artificial Sequence: synthetic
ugugguacugccugauagggu

SEQ ID NO: 1507 - RNA, 21 nt, Artificial Sequence
  Description of Artificial Sequence: synthetic
gugguacugccugauagggug

SEQ ID NO: 1508 - RNA, 21 nt, Artificial Sequence
  Description of Artificial Sequence: synthetic
gccccgggaggucucguagac

SEQ ID NO: 1509 - RNA, 21 nt, Artificial Sequence
  Description of Artificial Sequence: synthetic
ccccgggaggucucguagacc

SEQ ID NO: 1510 - RNA, 21 nt, Artificial Sequence
  Description of Artificial Sequence: synthetic
gguguacucaccgguuccgca

SEQ ID NO: 1511 - RNA, 21 nt, Artificial Sequence
  Description of Artificial Sequence: synthetic
cgguguacucaccgguuccgc

SEQ ID NO: 1512 - RNA, 21 nt, Artificial Sequence
  Description of Artificial Sequence: synthetic
cuaucaggcaguaccacaagg

SEQ ID NO: 1513 - RNA, 21 nt, Artificial Sequence
  Description of Artificial Sequence: synthetic
ccuaucaggcaguaccacaag

SEQ ID NO: 1514 - RNA, 21 nt, Artificial Sequence
  Description of Artificial Sequence: synthetic
cccuaucaggcaguaccacaa

SEQ ID NO: 1515 - RNA, 21 nt, Artificial Sequence
  Description of Artificial Sequence: synthetic
cuacgagaccucccggggcac

SEQ ID NO: 1516 - RNA, 21 nt, Artificial Sequence
  Description of Artificial Sequence: synthetic
ucuacgagaccucccggggca

SEQ ID NO: 1517 - RNA, 21 nt, Artificial Sequence
  Description of Artificial Sequence: synthetic
ggccacaugaguggccaaggc

SEQ ID NO: 1518 - RNA, 21 nt, Artificial Sequence
  Description of Artificial Sequence: synthetic
aggccacaugaguggccaagg

SEQ ID NO: 1519 - RNA, 21 nt, Artificial Sequence
  Description of Artificial Sequence: synthetic
gggauaguccgucaugguguu

SEQ ID NO: 1520 - RNA, 21 nt, Artificial Sequence
  Description of Artificial Sequence: synthetic
ugggauaguccgucauggugu

SEQ ID NO: 1521 - RNA, 21 nt, Artificial Sequence
  Description of Artificial Sequence: synthetic
gugggauaguccgucauggug

SEQ ID NO: 1522 - RNA, 21 nt, Artificial Sequence
  Description of Artificial Sequence: synthetic
cagaugcucuggagggccccg

SEQ ID NO: 1523 - RNA, 21 nt, Artificial Sequence
  Description of Artificial Sequence: synthetic
ccagaugcucuggagggcccc

SEQ ID NO: 1524 - RNA, 21 nt, Artificial Sequence
  Description of Artificial Sequence: synthetic
acgccuuggccacucaugugg

SEQ ID NO: 1525 - RNA, 21 nt, Artificial Sequence
  Description of Artificial Sequence: synthetic
cgccuuggccacucauguggc

SEQ ID NO: 1526 - RNA, 21 nt, Artificial Sequence
  Description of Artificial Sequence: synthetic
ggaacaccaugacggacuauc

SEQ ID NO: 1527 - RNA, 21 nt, Artificial Sequence
  Description of Artificial Sequence: synthetic
gaacaccaugacggacuaucc

SEQ ID NO: 1528 - RNA, 21 nt, Artificial Sequence
  Description of Artificial Sequence: synthetic
aacaccaugacggacuauccc

SEQ ID NO: 1529 - RNA, 21 nt, Artificial Sequence
  Description of Artificial Sequence: synthetic
cacggggcccuccagagcauc

SEQ ID NO: 1530 - RNA, 21 nt, Artificial Sequence
  Description of Artificial Sequence: synthetic
acggggcccuccagagcaucu

SEQ ID NO: 1531 - DNA, 21 bp, Artificial Sequence
  Description of Artificial Sequence: synthetic
  misc_feature (1)..(1): 5'-3 attached terminal deoxyabasic moiety
  misc_feature (1)..(6): internucleotide phosphorothioate linkages
  misc_feature (1)..(19): ribonucleotide modified as described
  misc_feature (21)..(21): 3'-3 attached terminal deoxyabasic moiety
ccccgggaggucucguagatt

SEQ ID NO: 1532 - DNA, 21 bp, Artificial Sequence
  Description of Artificial Sequence: synthetic
  misc_feature (1)..(1): 5'-3 attached terminal deoxyabasic moiety
  misc_feature (1)..(6): internucleotide phosphorothioate linkages
  misc_feature (1)..(19): ribonucleotide modified as described
  misc_feature (21)..(21): 3'-3 attached terminal deoxyabasic moiety
agaugcucuggagggcccctt

SEQ ID NO: 1533 - DNA, 21 bp, Artificial Sequence
  Description of Artificial Sequence: synthetic
  misc_feature (1)..(6): internucleotide phosphorothioate linkage
  misc_feature (1)..(19): ribonucleotide modified as described
  misc_feature (21)..(21): 3'-3 attached terminal deoxyabasic moiety
ucuacgagaccucccggggtt

SEQ ID NO: 1534 - DNA, 21 bp, Artificial Sequence
  Description of Artificial Sequence: synthetic
  misc_feature (1)..(6): internucleotide phosphorothioate linkages
  misc_feature (1)..(19): ribonucleotide modified as described
  misc_feature (21)..(21): 3'-3 attached terminal deoxyabasic moiety
ggggcccuccagagcaucutt

SEQ ID NO: 1535 - DNA, 21 bp, Artificial Sequence
  Description of Artificial Sequence: synthetic
  misc_feature (1)..(1): 5'-3 attached terminal deoxyabasic moiety
  misc_feature (1)..(5): internucleotide phosphorothioate linkages
  misc_feature (11)..(14): internucleotide phosphorothioate linkages
  misc_feature (16)..(17): internucleotide phosphorothioate linkage
  misc_feature (1)..(19): ribonucleotide modified as described
  misc_feature (21)..(21): 3'-3 attached terminal deoxyabasic moiety
ccccgggaggucucguagatt

SEQ ID NO: 1536 - DNA, 21 bp, Artificial Sequence
  Description of Artificial Sequence: synthetic
  misc_feature (1)..(1): 5'-3 attached terminal deoxyabasic moiety
  misc_feature (4)..(5): internucleotide phosphorothioate linkage
  misc_feature (6)..(10): internucleotide phosphorothioate linkages
  misc_feature (1)..(19): ribonucleotide modified as described
  misc_feature (16)..(20): internucleotide phosphorothioate linkages
  misc_feature (21)..(21): 3'-3 attached terminal deoxyabasic moiety
agaugcucuggagggcccctt

SEQ ID NO: 1537 - DNA, 21 bp, Artificial Sequence
  Description of Artificial Sequence: synthetic
  misc_feature (1)..(4): internucleotide phosphorothioate linkages
  misc_feature (5)..(6): internucleotide phosphorothioate linkage
  misc_feature (11)..(17): internucleotide phosphorothioate linkages
  misc_feature (1)..(19): ribonucleotide modified as described
  misc_feature (21)..(21): 3'-3 attached terminal deoxyabasic moiety
ucuacgagaccucccggggtt

SEQ ID NO: 1538 - DNA, 21 bp, Artificial Sequence
  Description of Artificial Sequence: synthetic
  misc_feature (5)..(11): internucleotide phosphorothioate linkage
  misc_feature (15)..(16): internucleotide phosphorothioate linkage
  misc_feature (17)..(20): internucleotide phosphorothioate linkage
  misc_feature (1)..(19): ribonucleotide modified as described
  misc_feature (21)..(21): 3'-3 attached terminal deoxyabasic moiety
  misc_feature (21)..(21): 3'-3 attached terminal deoxyabasic moiety
ggggcccuccagagcaucutt

SEQ ID NO: 1539 - DNA, 21 bp, Artificial Sequence
  Description of Artificial Sequence: synthetic
  misc_feature (1)..(1): 5'-3 attached terminal deoxyabasic moiety
  misc_feature (1)..(5): internucleotide phosphorothioate linkage
  misc_feature (1)..(4): 2'-deoxy-2'-fluoro
  misc_feature (11)..(14): 2'-deoxy-2'-fluoro
  misc_feature (16)..(16): 2'-deoxy-2'-fluoro
  misc_feature (17)..(20): internucleotide phosphorothioate linkage
  misc_feature (1)..(19): ribonucleotide modified as described
  misc_feature (21)..(21): 3'-3 attached terminal deoxyabasic moiety
ccccgggaggucucguagatt

SEQ ID NO: 1540 - DNA, 21 bp, Artificial Sequence
  Description of Artificial Sequence: synthetic
  misc_feature (1)..(1): 5'-3 attached terminal deoxyabasic moiety
  misc_feature (1)..(5): internucleotide phosphorothioate linkage
  misc_feature (4)..(4): 2'-deoxy-2'-fluoro
  misc_feature (6)..(9): 2'-deoxy-2'-fluoro
  misc_feature (16)..(19): 2'-deoxy-2'-fluoro
  misc_feature (17)..(20): internucleotide phosphorothioate linkage
  misc_feature (1)..(19): ribonucleotide modified as described
  misc_feature (21)..(21): 3'-3 attached terminal deoxyabasic moiety
agaugcucuggagggcccctt

SEQ ID NO: 1541 - DNA, 21 bp, Artificial Sequence
  Description of Artificial Sequence: synthetic
  misc_feature (1)..(1): 5'-3 attached terminal deoxyabasic moiety
  misc_feature (1)..(4): 2'-deoxy-2'-fluoro
  misc_feature (11)..(14): 2'-deoxy-2'-fluoro
  misc_feature (16)..(16): 2'-deoxy-2'-fluoro
  misc_feature (1)..(19): ribonucleotide modified as described
  misc_feature (21)..(21): 3'-3 attached terminal deoxyabasic moiety
ccccgggaggucucguagatt

SEQ ID NO: 1542 - DNA, 21 bp, Artificial Sequence
  Description of Artificial Sequence: synthetic
  misc_feature (1)..(1): 5'-3 attached terminal deoxyabasic moiety
  misc_feature (4)..(4): 2'-deoxy-2'-fluoro
  misc_feature (6)..(9): 2'-deoxy-2'-fluoro
  misc_feature (16)..(19): 2'-deoxy-2'-fluoro
  misc_feature (1)..(19): ribonucleotide modified as described
  misc_feature (21)..(21): 5'-3 attached terminal deoxyabasic moiety
agaugcucuggagggcccctt

SEQ ID NO: 1543 - DNA, 21 bp, Artificial Sequence
  Description of Artificial Sequence: synthetic
  misc_feature (1)..(1): 5'-3 attached terminal deoxyabasic moiety
  misc_feature (1)..(4): internucleotide phosphorothioate linkage
  misc_feature (5)..(6): internucleotide phosphorothioate linkage
  misc_feature (10)..(17): internucleotide phosphorothioate linkage
  misc_feature (1)..(19): ribonucleotide modified as described
  misc_feature (21)..(21): 3'-3 attached terminal deoxyabasic moiety
ucuacgagaccucccggggtt

SEQ ID NO: 1544 - RNA, 19 nt, Artificial Sequence
  Description of Artificial Sequence: synthetic
  misc_feature (1)..(3): 2'-deoxy-2'-fluoro
  misc_feature (5)..(5): 2'-deoxy-2'-fluoro
  misc_feature (10)..(15): 2'-deoxy-2'-fluoro
ucuacgagaccucccgggg

SEQ ID NO: 1545 - DNA, 21 bp, Artificial Sequence
  Description of Artificial Sequence: synthetic
  misc_feature (1)..(3): 2'-deoxy-2'-fluoro
  misc_feature (5)..(5): 2'-deoxy-2'-fluoro
  misc_feature (10)..(15): 2'-deoxy-2'-fluoro
  misc_feature (1)..(19): ribonucleotide modified as described
ucuacgagaccucccggggtt

SEQ ID NO: 1546 - DNA, 21 bp, Artificial Sequence
  Description of Artificial Sequence: synthetic
  misc_feature (5)..(10): 2'-deoxy-2'-fluoro
  misc_feature (15)..(15): 2'-deoxy-2'-fluoro
  misc_feature (17)..(19): 2'-deoxy-2'-fluoro
  misc_feature (1)..(19): ribonucleotide modified as described
ggggcccuccagagcaucutt

SEQ ID NO: 1547 - DNA, 21 bp, Artificial Sequence
  Description of Artificial Sequence: synthetic
  misc_feature (1)..(1): 5'-3 attached terminal deoxyabasic moiety
  misc_feature (1)..(3): 2'-deoxy-2'-fluoro
  misc_feature (5)..(5): 2'-deoxy-2'-fluoro
  misc_feature (10)..(15): 2'-deoxy-2'-fluoro
  misc_feature (1)..(19): ribonucleotide modified as described
  misc_feature (21)..(21): 3'-3 attached terminal deoxyabasic moiety
ucuacgagaccucccggggtt

SEQ ID NO: 1548 - DNA, 21 bp, Artificial Sequence
  Description of Artificial Sequence: synthetic
  misc_feature (1)..(5): internucleotide phosphorothioate linkage
  misc_feature (11)..(15): internucleotide phosphorothioate linkage
  misc_feature (16)..(17): internucleotide phosphorothioate linkage
  misc_feature (1)..(19): ribonucleotide modified as described
  misc_feature (21)..(21): 3'-3 attached terminal deoxyabasic moiety
ccccgggaggucucguagatt

SEQ ID NO: 1549 - RNA, 21 nt, Artificial Sequence
  Description of Artificial Sequence: synthetic
  misc_feature (21)..(21): 3'-3 attached terminal deoxyabasic moiety
ccccgggaggucucguagacc

SEQ ID NO: 1550 - RNA, 21 nt, Artificial Sequence
  Description of Artificial Sequence: synthetic
  misc_feature (1)..(1): 5'-3 attached terminal deoxyabasic moiety
  misc_feature (21)..(21): 3'-3 attached terminal deoxyabasic moiety
ccccgggaggucucguagacc

SEQ ID NO: 1551 - RNA, 21 nt, Artificial Sequence
  Description of Artificial Sequence: synthetic
  misc_feature (21)..(21): 3'-3 attached terminal deoxyabasic moiety
ucuacgagaccucccggggca

SEQ ID NO: 1552 - RNA, 21 nt, Artificial Sequence
  Description of Artificial Sequence: synthetic
  misc_feature (1)..(1): 5'-3 attached terminal deoxyabasic moiety
  misc_feature (21)..(21): 3'-3 attached terminal deoxyabasic moiety
ucuacgagaccucccggggca

SEQ ID NO: 1553 - DNA, 21 bp, Artificial Sequence
  Description of Artificial Sequence: synthetic
  misc_feature (1)..(1): 5'-3 attached terminal deoxyabasic moiety
  misc_feature (1)..(4): 2'-deoxy-2'-fluoro
  misc_feature (11)..(14): 2'-deoxy-2'-fluoro
  misc_feature (16)..(16): 2'-deoxy-2'-fluoro
  misc_feature (1)..(19): ribonucleotide modified as described
  misc_feature (21)..(21): 3'-3 attached terminal deoxyabasic moiety
ccccgggaggucucguagatt

SEQ ID NO: 1554 - DNA, 21 bp, Artificial Sequence
  Description of Artificial Sequence: synthetic
  misc_feature (1)..(3): 2'-deoxy-2'-fluoro
  misc_feature (5)..(5): 2'-deoxy-2'-fluoro
  misc_feature (10)..(15): 2'-deoxy-2'-fluoro
  misc_feature (1)..(19): ribonucleotide modified as described
  misc_feature (20)..(21): internucleotide phosphorothioate linkage
ucuacgagaccucccggggtt

SEQ ID NO: 1555 - DNA, 21 bp, Artificial Sequence
  Description of Artificial Sequence: synthetic
  misc_feature (1)..(1): 5'-3 attached terminal deoxyabasic moiety
  misc_feature (1)..(2): 2'-deoxy
  misc_feature (3)..(3): 2'-deoxy-2'-fluoro
  misc_feature (4)..(5): 2'-deoxy
  misc_feature (6)..(8): 2'-deoxy-2'-fluoro
  misc_feature (9)..(9): 2'-deoxy
  misc_feature (10)..(10): 2'-deoxy-2'-fluoro
  misc_feature (11)..(14): 2'-deoxy
  misc_feature (15)..(16): 2'-deoxy-2'-fluoro
  misc_feature (17)..(18): 2'-deoxy
  misc_feature (19)..(19): 2'-deoxy-2'-fluoro
  misc_feature (1)..(19): ribonucleotide modified as described
  misc_feature (21)..(21): 3'-3 attached terminal deoxyabasic moiety
aguggucugcggaaccggutt

SEQ ID NO: 1556 - DNA, 21 bp, Artificial Sequence
  Description of Artificial Sequence: synthetic
  misc_feature (1)..(1): 5'-3 attached terminal deoxyabasic moiety
  misc_feature (1)..(2): 2'-deoxy-2'-fluoro
  misc_feature (3)..(3): 2'-deoxy
  misc_feature (4)..(4): 2'-deoxy-2'-fluoro
  misc_feature (5)..(8): 2'-deoxy
  misc_feature (9)..(10): 2'-deoxy-2'-fluoro
  misc_feature (11)..(12): 2'-deoxy
  misc_feature (13)..(13): 2'-deoxy-2'-fluoro
  misc_feature (14)..(16): 2'-deoxy
  misc_feature (17)..(17): 2'-deoxy-2'-fluoro
  misc_feature (18)..(18): 2'-deoxy
  misc_feature (19)..(19): 2'-deoxy-2'-fluoro
  misc_feature (1)..(19): ribonucleotide modified as described
  misc_feature (21)..(21): 3'-3 attached terminal deoxyabasic moiety
cugcggaaccggugaguactt

SEQ ID NO: 1557 - DNA, 21 bp, Artificial Sequence
  Description of Artificial Sequence: synthetic
  misc_feature (1)..(1): 5'-3 attached terminal deoxyabasic moiety
  misc_feature (1)..(3): 2'-deoxy-2'-fluoro
  misc_feature (4)..(4): 2'-deoxy
  misc_feature (5)..(5): 2'-deoxy-2'-fluoro
  misc_feature (6)..(7): 2'-deoxy
  misc_feature (8)..(8): 2'-deoxy-2'-fluoro
  misc_feature (9)..(9): 2'-deoxy
  misc_feature (10)..(11): 2'-deoxy-2'-fluoro
  misc_feature (12)..(12): 2'-deoxy
  misc_feature (13)..(15): 2'-deoxy-2'-fluoro
  misc_feature (16)..(17): 2'-deoxy
  misc_feature (18)..(18): 2'-deoxy-2'-fluoro
  misc_feature (19)..(19): 2'-deoxy
  misc_feature (1)..(19): ribonucleotide modified as described
  misc_feature (21)..(21): 3'-3 attached terminal deoxyabasic moiety
cuugugguacugccugauatt

SEQ ID NO: 1558 - DNA, 21 bp, Artificial Sequence
  Description of Artificial Sequence: synthetic
  misc_feature (1)..(1): 5'-3 attached terminal deoxyabasic moiety
  misc_feature (1)..(1): 2'-deoxy-2'-fluoro
  misc_feature (2)..(3): 2'-deoxy
  misc_feature (4)..(4): 2'-deoxy-2'-fluoro
  misc_feature (5)..(5): 2'-deoxy
  misc_feature (6)..(7): 2'-deoxy-2'-fluoro
  misc_feature (8)..(8): 2'-deoxy
  misc_feature (9)..(11): 2'-deoxy-2'-fluoro
  misc_feature (12)..(13): 2'-deoxy
  misc_feature (14)..(14): 2'-deoxy-2'-fluoro
  misc_feature (15)..(18): 2'-deoxy
  misc_feature (19)..(19): 2'-deoxy-2'-fluoro
  misc_feature (1)..(19): ribonucleotide modified as described
  misc_feature (21)..(21): 3'-3 attached terminal deoxyabasic moiety
ugguacugccugauagggutt

SEQ ID NO: 1559 - DNA, 21 bp, Artificial Sequence
  Description of Artificial Sequence: synthetic
  misc_feature (1)..(1): 5'-3 attached terminal deoxyabasic moiety
  misc_feature (1)..(2): 2'-deoxy
  misc_feature (3)..(3): 2'-deoxy-2'-fluoro
  misc_feature (4)..(4): 2'-deoxy
  misc_feature (5)..(6): 2'-deoxy-2'-fluoro
  misc_feature (7)..(7): 2'-deoxy
  misc_feature (8)..(10): 2'-deoxy-2'-fluoro
  misc_feature (11)..(12): 2'-deoxy
  misc_feature (13)..(13): 2'-deoxy-2'-fluoro
  misc_feature (14)..(17): 2'-deoxy
  misc_feature (18)..(18): 2'-deoxy-2'-fluoro
  misc_feature (19)..(19): 2'-deoxy
  misc_feature (1)..(19): ribonucleotide modified as described
  misc_feature (21)..(21): 3'-3 attached terminal deoxyabasic moiety
gguacugccugauagggugtt

SEQ ID NO: 1560 - DNA, 21 bp, Artificial Sequence
  Description of Artificial Sequence: synthetic
  misc_feature (1)..(1): 5'-3 attached terminal deoxyabasic moiety
  misc_feature (1)..(1): 2'-deoxy
  misc_feature (2)..(2): 2'-deoxy-2'-fluoro
  misc_feature (3)..(3): 2'-deoxy
  misc_feature (4)..(5): 2'-deoxy-2'-fluoro
  misc_feature (6)..(6): 2'-deoxy
  misc_feature (7)..(9): 2'-deoxy-2'-fluoro
  misc_feature (10)..(11): 2'-deoxy
  misc_feature (12)..(12): 2'-deoxy-2'-fluoro
  misc_feature (13)..(16): 2'-deoxy
  misc_feature (17)..(17): 2'-deoxy-2'-fluoro
  misc_feature (18)..(18): 2'-deoxy
  misc_feature (19)..(19): 2'-deoxy-2'-fluoro
  misc_feature (1)..(19): ribonucleotide modified as described
  misc_feature (21)..(21): 3'-3 attached terminal deoxyabasic moiety
guacugccugauagggugctt

SEQ ID NO: 1561 - DNA, 21 bp, Artificial Sequence
  Description of Artificial Sequence: synthetic
  misc_feature (1)..(1): 5'-3 attached terminal deoxyabasic moiety
  misc_feature (1)..(1): 2'-deoxy-2'-fluoro
  misc_feature (2)..(2): 2'-deoxy
  misc_feature (3)..(4): 2'-deoxy-2'-fluoro
  misc_feature (5)..(5): 2'-deoxy
  misc_feature (6)..(8): 2'-deoxy-2'-fluoro
  misc_feature (9)..(10): 2'-deoxy
  misc_feature (11)..(11): 2'-deoxy-2'-fluoro
  misc_feature (12)..(15): 2'-deoxy
  misc_feature (16)..(16): 2'-deoxy-2'-fluoro
  misc_feature (17)..(17): 2'-deoxy
  misc_feature (18)..(19): 2'-deoxy-2'-fluoro
  misc_feature (1)..(19): ribonucleotide modified as described
  misc_feature (21)..(21): 3'-3 attached terminal deoxyabasic moiety
uacugccugauagggugcutt

SEQ ID NO: 1562 - DNA, 21 bp, Artificial Sequence
  Description of Artificial Sequence: synthetic
  misc_feature (1)..(1): 5'-3 attached terminal deoxyabasic moiety
  misc_feature (1)..(2): 2'-deoxy-2'-fluoro
  misc_feature (3)..(3): 2'-deoxy
  misc_feature (4)..(6): 2'-deoxy-2'-fluoro
  misc_feature (7)..(8): 2'-deoxy
  misc_feature (9)..(9): 2'-deoxy-2'-fluoro
  misc_feature (10)..(13): 2'-deoxy
  misc_feature (14)..(14): 2'-deoxy-2'-fluoro
  misc_feature (15)..(15): 2'-deoxy
  misc_feature (16)..(18): 2'-deoxy-2'-fluoro
  misc_feature (19)..(19): 2'-deoxy
  misc_feature (1)..(19): ribonucleotide modified as described
  misc_feature (21)..(21): 3'-3 attached terminal deoxyabasic moiety
cugccugauagggugcuugtt

SEQ ID NO: 1563 - DNA, 21 bp, Artificial Sequence
  Description of Artificial Sequence: synthetic
  misc_feature (1)..(1): 5'-3 attached terminal deoxyabasic moiety
  misc_feature (1)..(1): 2'-deoxy-2'-fluoro
  misc_feature (2)..(2): 2'-deoxy
  misc_feature (3)..(5): 2'-deoxy-2'-fluoro
  misc_feature (6)..(7): 2'-deoxy
  misc_feature (8)..(8): 2'-deoxy-2'-fluoro
  misc_feature (9)..(12): 2'-deoxy
  misc_feature (13)..(13): 2'-deoxy-2'-fluoro
  misc_feature (14)..(14): 2'-deoxy
  misc_feature (15)..(17): 2'-deoxy-2'-fluoro
  misc_feature (18)..(18): 2'-deoxy
  misc_feature (19)..(19): 2'-deoxy-2'-fluoro
  misc_feature (1)..(19): ribonucleotide modified as described
  misc_feature (21)..(21): 3'-3 attached terminal deoxyabasic moiety
ugccugauagggugcuugctt

SEQ ID NO: 1564 - DNA, 21 bp, Artificial Sequence
  Description of Artificial Sequence: synthetic
  misc_feature (1)..(1): 5'-3 attached terminal deoxyabasic moiety
  misc_feature (1)..(3): 2'-deoxy-2'-fluoro
  misc_feature (4)..(5): 2'-deoxy
  misc_feature (6)..(6): 2'-deoxy-2'-fluoro
  misc_feature (7)..(10): 2'-deoxy
  misc_feature (11)..(11): 2'-deoxy-2'-fluoro
  misc_feature (12)..(12): 2'-deoxy
  misc_feature (13)..(15): 2'-deoxy-2'-fluoro
  misc_feature (16)..(16): 2'-deoxy
  misc_feature (17)..(17): 2'-deoxy-2'-fluoro
  misc_feature (18)..(19): 2'-deoxy
  misc_feature (1)..(19): ribonucleotide modified as described
  misc_feature (21)..(21): 3'-3 attached terminal deoxyabasic moiety
ccugauagggugcuugcgatt

SEQ ID NO: 1565 - DNA, 21 bp, Artificial Sequence
  Description of Artificial Sequence: synthetic
  misc_feature (1)..(1): 5'-3 attached terminal deoxyabasic moiety
  misc_feature (1)..(2): 2'-deoxy
  misc_feature (3)..(3): 2'-deoxy-2'-fluoro
  misc_feature (4)..(7): 2'-deoxy
  misc_feature (8)..(8): 2'-deoxy-2'-fluoro
  misc_feature (9)..(9): 2'-deoxy
  misc_feature (10)..(12): 2'-deoxy-2'-fluoro
  misc_feature (13)..(13): 2'-deoxy
  misc_feature (14)..(14): 2'-deoxy-2'-fluoro
  misc_feature (15)..(17): 2'-deoxy
  misc_feature (18)..(18): 2'-deoxy-2'-fluoro
  misc_feature (19)..(19): 2'-deoxy
  misc_feature (1)..(19): ribonucleotide modified as described
  misc_feature (21)..(21): 3'-3 attached terminal deoxyabasic moiety
gauagggugcuugcgagugtt

SEQ ID NO: 1566 - DNA, 21 bp, Artificial Sequence
  Description of Artificial Sequence: synthetic
  misc_feature (1)..(1): 5'-3 attached terminal deoxyabasic moiety
  misc_feature (1)..(1): 2'-deoxy
  misc_feature (2)..(5): 2'-deoxy-2'-fluoro
  misc_feature (6)..(11): 2'-deoxy
  misc_feature (12)..(15): 2'-deoxy-2'-fluoro
  misc_feature (16)..(16): 2'-deoxy
  misc_feature (17)..(17): 2'-deoxy-2'-fluoro
  misc_feature (18)..(19): 2'-deoxy
  misc_feature (1)..(19): ribonucleotide modified as described
  misc_feature (21)..(21): 3'-3 attached terminal deoxyabasic moiety
gccccgggaggucucguagtt

SEQ ID NO: 1567 - DNA, 21 bp, Artificial Sequence
  Description of Artificial Sequence: synthetic
  misc_feature (1)..(1): 2'-O-methyl
  misc_feature (2)..(3): 2'-deoxy-2'-fluoro
  misc_feature (4)..(5): 2'-O-methyl
  misc_feature (6)..(9): 2'-deoxy-2'-fluoro
  misc_feature (10)..(10): 2'-O-methyl
  misc_feature (11)..(11): 2'-deoxy-2'-fluoro
  misc_feature (12)..(14): 2'-O-methyl
  misc_feature (15)..(16): 2'-deoxy-2'-fluoro
  misc_feature (17)..(17): 2'-O-methyl
  misc_feature (18)..(19): 2'-deoxy-2'-fluoro
  misc_feature (1)..(19): ribonucleotide modified as described
  misc_feature (20)..(21): internucleotide phosphorothioate linkage
accgguuccgcagaccacutt

SEQ ID NO: 1568 - DNA, 21 bp, Artificial Sequence
  Description of Artificial Sequence: synthetic
  misc_feature (1)..(1): 2'-O-methyl
  misc_feature (2)..(2): 2'-deoxy-2'-fluoro
  misc_feature (3)..(3): 2'-O-methyl
  misc_feature (4)..(6): 2'-deoxy-2'-fluoro
  misc_feature (7)..(7): 2'-O-methyl
  misc_feature (8)..(9): 2'-deoxy-2'-fluoro
  misc_feature (10)..(11): 2'-O-methyl
  misc_feature (12)..(15): 2'-deoxy-2'-fluoro
  misc_feature (16)..(16): 2'-O-methyl
  misc_feature (17)..(17): 2'-deoxy-2'-fluoro
  misc_feature (18)..(19): 2'-O-methyl
  misc_feature (1)..(19): ribonucleotide modified as described
  misc_feature (20)..(21): internucleotide phosphorothioate linkage
guacucaccgguuccgcagtt

SEQ ID NO: 1569 - DNA, 21 bp, Artificial Sequence
  Description of Artificial Sequence: synthetic
  misc_feature (1)..(1): 2'-deoxy-2'-fluoro
  misc_feature (2)..(2): 2'-O-methyl
  misc_feature (3)..(4): 2'-deoxy-2'-fluoro
  misc_feature (5)..(7): 2'-O-methyl
  misc_feature (8)..(8): 2'-deoxy-2'-fluoro
  misc_feature (9)..(10): 2'-O-methyl
  misc_feature (11)..(11): 2'-deoxy-2'-fluoro
  misc_feature (12)..(12): 2'-O-methyl
  misc_feature (13)..(14): 2'-deoxy-2'-fluoro
  misc_feature (15)..(15): 2'-O-methyl
  misc_feature (16)..(16): 2'-deoxy-2'-fluoro
  misc_feature (17)..(19): 2'-O-methyl
  misc_feature (1)..(19): ribonucleotide modified as described
  misc_feature (20)..(21): internucleotide phosphorothioate linkage
uaucaggcaguaccacaagtt

SEQ ID NO: 1570 - DNA, 21 bp, Artificial Sequence
  Description of Artificial Sequence: synthetic
  misc_feature (1)..(1): 2'-O-methyl
  misc_feature (2)..(5): 2'-deoxy-2'-fluoro
  misc_feature (6)..(6): 2'-O-methyl
  misc_feature (7)..(8): 2'-deoxy-2'-fluoro
  misc_feature (9)..(11): 2'-O-methyl
  misc_feature (12)..(12): 2'-deoxy-2'-fluoro
  misc_feature (13)..(14): 2'-O-methyl
  misc_feature (15)..(15): 2'-deoxy-2'-fluoro
  misc_feature (16)..(16): 2'-O-methyl
  misc_feature (17)..(18): 2'-deoxy-2'-fluoro
  misc_feature (19)..(19): 2'-O-methyl
  misc_feature (1)..(19): ribonucleotide modified as described
  misc_feature (20)..(21): internucleotide phosphorothioate linkage
acccuaucaggcaguaccatt

SEQ ID NO: 1571 - DNA, 21 bp, Artificial Sequence
  Description of Artificial Sequence: synthetic
  misc_feature (1)..(1): 2'-deoxy-2'-fluoro
  misc_feature (2)..(2): 2'-O-methyl
  misc_feature (3)..(6): 2'-deoxy-2'-fluoro
  misc_feature (7)..(7): 2'-O-methyl
  misc_feature (8)..(9): 2'-deoxy-2'-fluoro
  misc_feature (10)..(12): 2'-O-methyl
  misc_feature (13)..(13): 2'-deoxy-2'-fluoro
  misc_feature (14)..(15): 2'-O-methyl
  misc_feature (16)..(16): 2'-deoxy-2'-fluoro
  misc_feature (17)..(17): 2'-O-methyl
  misc_feature (18)..(19): 2'-deoxy-2'-fluoro
  misc_feature (1)..(19): ribonucleotide modified as described
  misc_feature (20)..(21): internucleotide phosphorothioate linkage
cacccuaucaggcaguacctt

SEQ ID NO: 1572 - DNA, 21 bp, Artificial Sequence
  Description of Artificial Sequence: synthetic
  misc_feature (1)..(1): 2'-O-methyl
  misc_feature (2)..(2): 2'-deoxy-2'-fluoro
  misc_feature (3)..(3): 2'-O-methyl
  misc_feature (4)..(7): 2'-deoxy-2'-fluoro
  misc_feature (8)..(8): 2'-O-methyl
  misc_feature (9)..(10): 2'-deoxy-2'-fluoro
  misc_feature (11)..(13): 2'-O-methyl
  misc_feature (14)..(14): 2'-deoxy-2'-fluoro
  misc_feature (15)..(16): 2'-O-methyl
  misc_feature (17)..(17): 2'-deoxy-2'-fluoro
  misc_feature (18)..(18): 2'-O-methyl
  misc_feature (19)..(19): 2'-deoxy-2'-fluoro
  misc_feature (1)..(19): ribonucleotide modified as described
  misc_feature (20)..(21): internucleotide phosphorothioate linkage
gcacccuaucaggcaguactt

SEQ ID NO: 1573 - DNA, 21 bp, Artificial Sequence
  Description of Artificial Sequence: synthetic
  misc_feature (1)..(2): 2'-O-methyl
  misc_feature (3)..(3): 2'-deoxy-2'-fluoro
  misc_feature (4)..(4): 2'-O-methyl
  misc_feature (5)..(8): 2'-deoxy-2'-fluoro
  misc_feature (9)..(9): 2'-O-methyl
  misc_feature (10)..(11): 2'-deoxy-2'-fluoro
  misc_feature (12)..(14): 2'-O-methyl
  misc_feature (15)..(15): 2'-deoxy-2'-fluoro
  misc_feature (16)..(17): 2'-O-methyl
  misc_feature (18)..(18): 2'-deoxy-2'-fluoro
  misc_feature (19)..(19): 2'-O-methyl
  misc_feature (1)..(19): ribonucleotide modified as described
  misc_feature (20)..(21): internucleotide phosphorothioate linkage
agcacccuaucaggcaguatt

SEQ ID NO: 1574 - DNA, 21 bp, Artificial Sequence
  Description of Artificial Sequence: synthetic
  misc_feature (1)..(1): 2'-deoxy-2'-fluoro
  misc_feature (2)..(4): 2'-O-methyl
  misc_feature (5)..(5): 2'-deoxy-2'-fluoro
  misc_feature (6)..(6): 2'-O-methyl
  misc_feature (7)..(10): 2'-deoxy-2'-fluoro
  misc_feature (11)..(11): 2'-O-methyl
  misc_feature (12)..(13): 2'-deoxy-2'-fluoro
  misc_feature (14)..(16): 2'-O-methyl
  misc_feature (17)..(17): 2'-deoxy-2'-fluoro
  misc_feature (18)..(19): 2'-O-methyl
  misc_feature (1)..(19): ribonucleotide modified as described
  misc_feature (20)..(21): internucleotide phosphorothioate linkage
caagcacccuaucaggcagtt

SEQ ID NO: 1575 - DNA, 21 bp, Artificial Sequence
  Description of Artificial Sequence: synthetic
  misc_feature (1)..(1): 2'-O-methyl
  misc_feature (2)..(2): 2'-deoxy-2'-fluoro
  misc_feature (3)..(5): 2'-O-methyl
  misc_feature (6)..(6): 2'-deoxy-2'-fluoro
  misc_feature (7)..(7): 2'-O-methyl
  misc_feature (8)..(11): 2'-deoxy-2'-fluoro
  misc_feature (12)..(12): 2'-O-methyl
  misc_feature (13)..(14): 2'-deoxy-2'-fluoro
  misc_feature (15)..(17): 2'-O-methyl
  misc_feature (18)..(18): 2'-deoxy-2'-fluoro
  misc_feature (19)..(19): 2'-O-methyl
  misc_feature (1)..(19): ribonucleotide modified as described
  misc_feature (20)..(21): internucleotide phosphorothioate linkage
gcaagcacccuaucaggcatt

SEQ ID NO: 1576 - DNA, 21 bp, Artificial Sequence
  Description of Artificial Sequence: synthetic
  misc_feature (1)..(2): 2'-deoxy-2'-fluoro
  misc_feature (3)..(3): 2'-O-methyl
  misc_feature (4)..(4): 2'-deoxy-2'-fluoro
  misc_feature (5)..(7): 2'-O-methyl
  misc_feature (8)..(8): 2'-deoxy-2'-fluoro
  misc_feature (9)..(9): 2'-O-methyl
  misc_feature (10)..(13): 2'-deoxy-2'-fluoro
  misc_feature (14)..(14): 2'-O-methyl
  misc_feature (15)..(16): 2'-deoxy-2'-fluoro
  misc_feature (17)..(19): 2'-O-methyl
  misc_feature (1)..(19): ribonucleotide modified as described
  misc_feature (20)..(21): internucleotide phosphorothioate linkage
ucgcaagcacccuaucaggtt

SEQ ID NO: 1577 - DNA, 21 bp, Artificial Sequence
  Description of Artificial Sequence: synthetic
  misc_feature (1)..(1): 2'-deoxy-2'-fluoro
  misc_feature (2)..(2): 2'-O-methyl
  misc_feature (3)..(5): 2'-deoxy-2'-fluoro
  misc_feature (6)..(6): 2'-O-methyl
  misc_feature (7)..(7): 2'-deoxy-2'-fluoro
  misc_feature (8)..(10): 2'-O-methyl
  misc_feature (11)..(11): 2'-deoxy-2'-fluoro
  misc_feature (12)..(12): 2'-O-methyl
  misc_feature (13)..(16): 2'-deoxy-2'-fluoro
  misc_feature (17)..(17): 2'-O-methyl
  misc_feature (18)..(19): 2'-deoxy-2'-fluoro
  misc_feature (1)..(19): ribonucleotide modified as described
  misc_feature (20)..(21): internucleotide phosphorothioate linkage
cacucgcaagcacccuauctt

SEQ ID NO: 1578 - DNA, 21 bp, Artificial Sequence
  Description of Artificial Sequence: synthetic
  misc_feature (1)..(2): 2'-deoxy-2'-fluoro
  misc_feature (3)..(3): 2'-O-methyl
  misc_feature (4)..(4): 2'-deoxy-2'-fluoro
  misc_feature (5)..(8): 2'-O-methyl
  misc_feature (9)..(14): 2'-deoxy-2'-fluoro
  misc_feature (15)..(18): 2'-O-methyl
  misc_feature (19)..(19): 2'-deoxy-2'-fluoro
  misc_feature (1)..(19): ribonucleotide modified as described
  misc_feature (20)..(21): internucleotide phosphorothioate linkage
cuacgagaccucccggggctt

SEQ ID NO: 1579 - DNA, 21 bp, Artificial Sequence
  Description of Artificial Sequence: synthetic
  misc_feature (1)..(1): 5'-3 attached terminal deoxyabasic moiety
  misc_feature (1)..(1): 2'-deoxy-2'-fluoro
  misc_feature (2)..(3): 2'-deoxy
  misc_feature (4)..(5): 2'-deoxy-2'-fluoro
  misc_feature (6)..(9): 2'-deoxy
  misc_feature (10)..(10): 2'-deoxy-2'-fluoro
  misc_feature (11)..(11): 2'-deoxy
  misc_feature (12)..(14): 2'-deoxy-2'-fluoro
  misc_feature (15)..(16): 2'-deoxy
  misc_feature (17)..(17): 2'-deoxy-2'-fluoro
  misc_feature (18)..(19): 2'-deoxy
  misc_feature (1)..(19): ribonucleotide modified as described
  misc_feature (21)..(21): 3'-3 attached terminal deoxyabasic moiety
uggccaaggcgucuggugatt

SEQ ID NO: 1580 - DNA, 21 bp, Artificial Sequence
  Description of Artificial Sequence: synthetic
  misc_feature (1)..(1): 5'-3 attached terminal deoxyabasic moiety
  misc_feature (1)..(1): 2'-deoxy-2'-fluoro
  misc_feature (2)..(2): 2'-deoxy
  misc_feature (3)..(3): 2'-deoxy-2'-fluoro
  misc_feature (4)..(6): 2'-deoxy
  misc_feature (7)..(7): 2'-deoxy-2'-fluoro
  misc_feature (8)..(9): 2'-deoxy
  misc_feature (10)..(11): 2'-deoxy-2'-fluoro
  misc_feature (12)..(15): 2'-deoxy
  misc_feature (16)..(16): 2'-deoxy-2'-fluoro
  misc_feature (17)..(17): 2'-deoxy
  misc_feature (18)..(19): 2'-deoxy-2'-fluoro
  misc_feature (1)..(19): ribonucleotide modified as described
  misc_feature (21)..(21): 3'-3 attached terminal deoxyabasic moiety
caugaguggccaaggcguctt

SEQ ID NO: 1581 - DNA, 21 bp, Artificial Sequence
  Description of Artificial Sequence: synthetic
  misc_feature (1)..(1): 5'-3 attached terminal deoxyabasic moiety
  misc_feature (1)..(1): 2'-deoxy
  misc_feature (2)..(2): 2'-deoxy-2'-fluoro
  misc_feature (3)..(4): 2'-deoxy
  misc_feature (5)..(7): 2'-deoxy-2'-fluoro
  misc_feature (8)..(8): 2'-deoxy
  misc_feature (9)..(10): 2'-deoxy-2'-fluoro
  misc_feature (11)..(11): 2'-deoxy
  misc_feature (12)..(12): 2'-deoxy-2'-fluoro
  misc_feature (13)..(14): 2'-deoxy
  misc_feature (15)..(15): 2'-deoxy-2'-fluoro
  misc_feature (16)..(16): 2'-deoxy
  misc_feature (17)..(19): 2'-deoxy-2'-fluoro
  misc_feature (1)..(19): ribonucleotide modified as described
  misc_feature (21)..(21): 3'-3 attached terminal deoxyabasic moiety
auaguccgucaugguguuctt

SEQ ID NO: 1582 - DNA, 21 bp, Artificial Sequence
  Description of Artificial Sequence: synthetic
  misc_feature (1)..(1): 5'-3 attached terminal deoxyabasic moiety
  misc_feature (1)..(1): 2'-deoxy-2'-fluoro
  misc_feature (2)..(5): 2'-deoxy
  misc_feature (6)..(6): 2'-deoxy-2'-fluoro
  misc_feature (7)..(8): 2'-deoxy
  misc_feature (9)..(11): 2'-deoxy-2'-fluoro
  misc_feature (12)..(12): 2'-deoxy
  misc_feature (13)..(14): 2'-deoxy-2'-fluoro
  misc_feature (15)..(15): 2'-deoxy
  misc_feature (16)..(16): 2'-deoxy-2'-fluoro
  misc_feature (17)..(18): 2'-deoxy
  misc_feature (19)..(19): 2'-deoxy-2'-fluoro
  misc_feature (1)..(19): ribonucleotide modified as described
  misc_feature (21)..(21): 3'-3 attached terminal deoxyabasic moiety
ugggauaguccgucauggutt

SEQ ID NO: 1583 - DNA, 21 bp, Artificial Sequence
  Description of Artificial Sequence: synthetic
  misc_feature (1)..(1): 5'-3 attached terminal deoxyabasic moiety
  misc_feature (1)..(1): 2'-deoxy
  misc_feature (2)..(2): 2'-deoxy-2'-fluoro
  misc_feature (3)..(6): 2'-deoxy
  misc_feature (7)..(7): 2'-deoxy-2'-fluoro
  misc_feature (8)..(9): 2'-deoxy
  misc_feature (10)..(12): 2'-deoxy-2'-fluoro
  misc_feature (13)..(13): 2'-deoxy
  misc_feature (14)..(15): 2'-deoxy-2'-fluoro
  misc_feature (16)..(16): 2'-deoxy
  misc_feature (17)..(17): 2'-deoxy-2'-fluoro
  misc_feature (18)..(19): 2'-deoxy
  misc_feature (1)..(19): ribonucleotide modified as described
  misc_feature (21)..(21): 3'-3 attached terminal deoxyabasic moiety
gugggauaguccgucauggtt

SEQ ID NO: 1584 - DNA, 21 bp, Artificial Sequence
  Description of Artificial Sequence: synthetic
  misc_feature (1)..(1): 5'-3 attached terminal deoxyabasic moiety
  misc_feature (1)..(1): 2'-deoxy-2'-fluoro
  misc_feature (2)..(2): 2'-deoxy
  misc_feature (3)..(3): 2'-deoxy-2'-fluoro
  misc_feature (4)..(7): 2'-deoxy
  misc_feature (8)..(8): 2'-deoxy-2'-fluoro
  misc_feature (9)..(10): 2'-deoxy
  misc_feature (11)..(13): 2'-deoxy-2'-fluoro
  misc_feature (14)..(14): 2'-deoxy
  misc_feature (15)..(16): 2'-deoxy-2'-fluoro
  misc_feature (17)..(17): 2'-deoxy
  misc_feature (18)..(18): 2'-deoxy-2'-fluoro
  misc_feature (19)..(19): 2'-deoxy
  misc_feature (1)..(19): ribonucleotide modified as described
  misc_feature (21)..(21): 3'-3 attached terminal deoxyabasic moiety
cgugggauaguccgucaugtt

SEQ ID NO: 1585 - DNA, 21 bp, Artificial Sequence
  Description of Artificial Sequence: synthetic
  misc_feature (1)..(1): 5'-3 attached terminal deoxyabasic moiety
  misc_feature (1)..(2): 2'-deoxy-2'-fluoro
  misc_feature (3)..(3): 2'-deoxy
  misc_feature (4)..(4): 2'-deoxy-2'-fluoro
  misc_feature (5)..(8): 2'-deoxy
  misc_feature (9)..(9): 2'-deoxy-2'-fluoro
  misc_feature (10)..(11): 2'-deoxy
  misc_feature (12)..(14): 2'-deoxy-2'-fluoro
  misc_feature (15)..(15): 2'-deoxy
  misc_feature (16)..(17): 2'-deoxy-2'-fluoro
  misc_feature (18)..(18): 2'-deoxy
  misc_feature (19)..(19): 2'-deoxy-2'-fluoro
  misc_feature (1)..(19): ribonucleotide modified as described
  misc_feature (21)..(21): 3'-3 attached terminal deoxyabasic moiety
ucgugggauaguccgucautt

SEQ ID NO: 1586 - DNA, 21 bp, Artificial Sequence
  Description of Artificial Sequence: synthetic
  misc_feature (1)..(1): 5'-3 attached terminal deoxyabasic moiety
  misc_feature (1)..(1): 2'-deoxy
  misc_feature (2)..(4): 2'-deoxy-2'-fluoro
  misc_feature (5)..(5): 2'-deoxy
  misc_feature (6)..(6): 2'-deoxy-2'-fluoro
  misc_feature (7)..(10): 2'-deoxy
  misc_feature (11)..(11): 2'-deoxy-2'-fluoro
  misc_feature (12)..(13): 2'-deoxy
  misc_feature (14)..(16): 2'-deoxy-2'-fluoro
  misc_feature (17)..(17): 2'-deoxy
  misc_feature (18)..(19): 2'-deoxy-2'-fluoro
  misc_feature (1)..(19): ribonucleotide modified as described
  misc_feature (21)..(21): 3'-3 attached terminal deoxyabasic moiety
guucgugggauaguccguctt

SEQ ID NO: 1587 - DNA, 21 bp, Artificial Sequence
  Description of Artificial Sequence: synthetic
  misc_feature (1)..(1): 5'-3 attached terminal deoxyabasic moiety
  misc_feature (1)..(1): 2'-deoxy-2'-fluoro
  misc_feature (2)..(2): 2'-deoxy
  misc_feature (3)..(5): 2'-deoxy-2'-fluoro
  misc_feature (6)..(6): 2'-deoxy
  misc_feature (7)..(7): 2'-deoxy-2'-fluoro
  misc_feature (8)..(11): 2'-deoxy
  misc_feature (12)..(12): 2'-deoxy-2'-fluoro
  misc_feature (13)..(14): 2'-deoxy
  misc_feature (15)..(17): 2'-deoxy-2'-fluoro
  misc_feature (18)..(18): 2'-deoxy
  misc_feature (19)..(19): 2'-deoxy-2'-fluoro
  misc_feature (1)..(19): ribonucleotide modified as described
  misc_feature (21)..(21): 3'-3 attached terminal deoxyabasic moiety
cguucgugggauaguccgutt

SEQ ID NO: 1588 - DNA, 21 bp, Artificial Sequence
  Description of Artificial Sequence: synthetic
  misc_feature (1)..(1): 5'-3 attached terminal deoxyabasic moiety
  misc_feature (1)..(2): 2'-deoxy
  misc_feature (3)..(3): 2'-deoxy-2'-fluoro
  misc_feature (4)..(4): 2'-deoxy
  misc_feature (5)..(7): 2'-deoxy-2'-fluoro
  misc_feature (8)..(8): 2'-deoxy
  misc_feature (9)..(9): 2'-deoxy-2'-fluoro
  misc_feature (10)..(13): 2'-deoxy
  misc_feature (14)..(14): 2'-deoxy-2'-fluoro
  misc_feature (15)..(16): 2'-deoxy
  misc_feature (17)..(19): 2'-deoxy-2'-fluoro
  misc_feature (1)..(19): ribonucleotide modified as described
  misc_feature (21)..(21): 3'-3 attached terminal deoxyabasic moiety
agcguucgugggauagucctt

SEQ ID NO: 1589 - DNA, 21 bp, Artificial Sequence
  Description of Artificial Sequence: synthetic
  misc_feature (1)..(1): 5'-3 attached terminal deoxyabasic moiety
  misc_feature (1)..(1): 2'-deoxy
  misc_feature (2)..(2): 2'-deoxy-2'-fluoro
  misc_feature (3)..(5): 2'-deoxy
  misc_feature (6)..(6): 2'-deoxy-2'-fluoro
  misc_feature (7)..(7): 2'-deoxy
  misc_feature (8)..(10): 2'-deoxy-2'-fluoro
  misc_feature (11)..(11): 2'-deoxy
  misc_feature (12)..(12): 2'-deoxy-2'-fluoro
  misc_feature (13)..(16): 2'-deoxy
  misc_feature (17)..(17): 2'-deoxy-2'-fluoro
  misc_feature (18)..(19): 2'-deoxy
  misc_feature (1)..(19): ribonucleotide modified as described
  misc_feature (21)..(21): 3'-3 attached terminal deoxyabasic moiety
gugagcguucgugggauagtt

SEQ ID NO: 1590 - DNA, 21 bp, Artificial Sequence
  Description of Artificial Sequence: synthetic
  misc_feature (1)..(1): 5'-3 attached terminal deoxyabasic moiety
  misc_feature (1)..(2): 2'-deoxy
  misc_feature (3)..(3): 2'-deoxy-2'-fluoro
  misc_feature (4)..(4): 2'-deoxy
  misc_feature (5)..(8): 2'-deoxy-2'-fluoro
  misc_feature (9)..(14): 2'-deoxy
  misc_feature (15)..(18): 2'-deoxy-2'-fluoro
  misc_feature (19)..(19): 2'-deoxy
  misc_feature (1)..(19): ribonucleotide modified as described
  misc_feature (21)..(21): 3'-3 attached terminal deoxyabasic moiety
gaugcucuggagggccccgtt

SEQ ID NO: 1591 - DNA, 21 bp, Artificial Sequence
  Description of Artificial Sequence: synthetic
  misc_feature (1)..(2): 2'-deoxy-2'-fluoro
  misc_feature (3)..(3): 2'-O-methyl
  misc_feature (4)..(5): 2'-deoxy-2'-fluoro
  misc_feature (6)..(8): 2'-O-methyl
  misc_feature (9)..(9): 2'-deoxy-2'-fluoro
  misc_feature (10)..(10): 2'-O-methyl
  misc_feature (11)..(14): 2'-deoxy-2'-fluoro
  misc_feature (15)..(16): 2'-O-methyl
  misc_feature (17)..(18): 2'-deoxy-2'-fluoro
  misc_feature (19)..(19): 2'-O-methyl
  misc_feature (1)..(19): ribonucleotide modified as described
  misc_feature (20)..(21): internucleotide phosphorothioate linkage
ucaccagacgccuuggccatt

SEQ ID NO: 1592 - DNA, 21 bp, Artificial Sequence
  Description of Artificial Sequence: synthetic
  misc_feature (1)..(1): 2'-O-methyl
  misc_feature (2)..(3): 2'-deoxy-2'-fluoro
  misc_feature (4)..(4): 2'-O-methyl
  misc_feature (5)..(8): 2'-deoxy-2'-fluoro
  misc_feature (9)..(10): 2'-O-methyl
  misc_feature (11)..(12): 2'-deoxy-2'-fluoro
  misc_feature (13)..(13): 2'-O-methyl
  misc_feature (14)..(16): 2'-deoxy-2'-fluoro
  misc_feature (17)..(17): 2'-O-methyl
  misc_feature (18)..(18): 2'-deoxy-2'-fluoro
  misc_feature (19)..(19): 2'-O-methyl
  misc_feature (1)..(19): ribonucleotide modified as described
  misc_feature (20)..(21): internucleotide phosphorothioate linkage
gacgccuuggccacucaugtt

SEQ ID NO: 1593 - DNA, 21 bp, Artificial Sequence
  Description of Artificial Sequence: synthetic
  misc_feature (1)..(3): 2'-O-methyl
  misc_feature (4)..(4): 2'-deoxy-2'-fluoro
  misc_feature (5)..(5): 2'-O-methyl
  misc_feature (6)..(7): 2'-deoxy-2'-fluoro
  misc_feature (8)..(8): 2'-O-methyl
  misc_feature (9)..(9): 2'-deoxy-2'-fluoro
  misc_feature (10)..(11): 2'-O-methyl
  misc_feature (12)..(12): 2'-deoxy-2'-fluoro
  misc_feature (13)..(15): 2'-O-methyl
  misc_feature (16)..(17): 2'-deoxy-2'-fluoro
  misc_feature (18)..(18): 2'-O-methyl
  misc_feature (19)..(19): 2'-deoxy-2'-fluoro
  misc_feature (1)..(19): ribonucleotide modified as described
  misc_feature (20)..(21): internucleotide phosphorothioate linkage
gaacaccaugacggacuautt

SEQ ID NO: 1594 - DNA, 21 bp, Artificial Sequence
  Description of Artificial Sequence: synthetic
  misc_feature (1)..(1): 2'-O-methyl
  misc_feature (2)..(3): 2'-deoxy-2'-fluoro
  misc_feature (4)..(4): 2'-O-methyl
  misc_feature (5)..(5): 2'-deoxy-2'-fluoro
  misc_feature (6)..(7): 2'-O-methyl
  misc_feature (8)..(8): 2'-deoxy-2'-fluoro
  misc_feature (9)..(11): 2'-O-methyl
  misc_feature (12)..(13): 2'-deoxy-2'-fluoro
  misc_feature (14)..(14): 2'-O-methyl
  misc_feature (15)..(18): 2'-deoxy-2'-fluoro
  misc_feature (19)..(19): 2'-O-methyl
  misc_feature (1)..(19): ribonucleotide modified as described
  misc_feature (20)..(21): internucleotide phosphorothioate linkage
accaugacggacuaucccatt

SEQ ID NO: 1595 - DNA, 21 bp, Artificial Sequence
  Description of Artificial Sequence: synthetic
  misc_feature (1)..(2): 2'-deoxy-2'-fluoro
  misc_feature (3)..(3): 2'-O-methyl
  misc_feature (4)..(4): 2'-deoxy-2'-fluoro
  misc_feature (5)..(6): 2'-O-methyl
  misc_feature (7)..(7): 2'-deoxy-2'-fluoro
  misc_feature (8)..(10): 2'-O-methyl
  misc_feature (11)..(12): 2'-deoxy-2'-fluoro
  misc_feature (13)..(13): 2'-O-methyl
  misc_feature (14)..(17): 2'-deoxy-2'-fluoro
  misc_feature (18)..(18): 2'-O-methyl
  misc_feature (19)..(19): 2'-deoxy-2'-fluoro
  misc_feature (1)..(19): ribonucleotide modified as described
  misc_feature (20)..(21): internucleotide phosphorothioate linkage
ccaugacggacuaucccactt

SEQ ID NO: 1596 - DNA, 21 bp, Artificial Sequence
  Description of Artificial Sequence: synthetic
  misc_feature (1)..(1): 2'-deoxy-2'-fluoro
  misc_feature (2)..(2): 2'-O-methyl
  misc_feature (3)..(3): 2'-deoxy-2'-fluoro
  misc_feature (4)..(5): 2'-O-methyl
  misc_feature (6)..(6): 2'-deoxy-2'-fluoro
  misc_feature (7)..(9): 2'-O-methyl
  misc_feature (10)..(11): 2'-deoxy-2'-fluoro
  misc_feature (12)..(12): 2'-O-methyl
  misc_feature (13)..(16): 2'-deoxy-2'-fluoro
  misc_feature (17)..(17): 2'-O-methyl
  misc_feature (18)..(18): 2'-deoxy-2'-fluoro
  misc_feature (19)..(19): 2'-O-methyl
  misc_feature (1)..(19): ribonucleotide modified as described
  misc_feature (20)..(21): internucleotide phosphorothioate linkage
caugacggacuaucccacgtt

SEQ ID NO: 1597 - DNA, 21 bp, Artificial Sequence
  Description of Artificial Sequence: synthetic
  misc_feature (1)..(1): 2'-O-methyl
  misc_feature (2)..(2): 2'-deoxy-2'-fluoro
  misc_feature (3)..(4): 2'-O-methyl
  misc_feature (5)..(5): 2'-deoxy-2'-fluoro
  misc_feature (6)..(8): 2'-O-methyl
  misc_feature (9)..(10): 2'-deoxy-2'-fluoro
  misc_feature (11)..(11): 2'-O-methyl
  misc_feature (12)..(15): 2'-deoxy-2'-fluoro
  misc_feature (16)..(16): 2'-O-methyl
  misc_feature (17)..(17): 2'-deoxy-2'-fluoro
  misc_feature (18)..(19): 2'-O-methyl
  misc_feature (1)..(19): ribonucleotide modified as described
  misc_feature (20)..(21): internucleotide phosphorothioate linkage
augacggacuaucccacgatt

SEQ ID NO: 1598 - DNA, 21 bp, Artificial Sequence
  Description of Artificial Sequence: synthetic
  misc_feature (1)..(2): 2'-O-methyl
  misc_feature (3)..(3): 2'-deoxy-2'-fluoro
  misc_feature (4)..(6): 2'-O-methyl
  misc_feature (7)..(8): 2'-deoxy-2'-fluoro
  misc_feature (9)..(9): 2'-O-methyl
  misc_feature (10)..(13): 2'-deoxy-2'-fluoro
  misc_feature (14)..(14): 2'-O-methyl
  misc_feature (15)..(15): 2'-deoxy-2'-fluoro
  misc_feature (16)..(18): 2'-O-methyl
  misc_feature (19)..(19): 2'-deoxy-2'-fluoro
  misc_feature (1)..(19): ribonucleotide modified as described
  misc_feature (20)..(21): internucleotide phosphorothioate linkage
gacggacuaucccacgaactt

SEQ ID NO: 1599 - DNA, 21 bp, Artificial Sequence
  Description of Artificial Sequence: synthetic
  misc_feature (1)..(1): 2'-O-methyl
  misc_feature (2)..(2): 2'-deoxy-2'-fluoro
  misc_feature (3)..(5): 2'-O-methyl
  misc_feature (6)..(7): 2'-deoxy-2'-fluoro
  misc_feature (8)..(8): 2'-O-methyl
  misc_feature (9)..(12): 2'-deoxy-2'-fluoro
  misc_feature (13)..(13): 2'-O-methyl
  misc_feature (14)..(14): 2'-deoxy-2'-fluoro
  misc_feature (15)..(17): 2'-O-methyl
  misc_feature (18)..(18): 2'-deoxy-2'-fluoro
  misc_feature (19)..(19): 2'-O-methyl
  misc_feature (1)..(19): ribonucleotide modified as described
  misc_feature (20)..(21): internucleotide phosphorothioate linkage
acggacuaucccacgaacgtt

SEQ ID NO: 1600 - DNA, 21 bp, Artificial Sequence
  Description of Artificial Sequence: synthetic
  misc_feature (1)..(3): 2'-O-methyl
  misc_feature (4)..(5): 2'-deoxy-2'-fluoro
  misc_feature (6)..(6): 2'-O-methyl
  misc_feature (7)..(10): 2'-deoxy-2'-fluoro
  misc_feature (11)..(11): 2'-O-methyl
  misc_feature (12)..(12): 2'-deoxy-2'-fluoro
  misc_feature (13)..(15): 2'-O-methyl
  misc_feature (16)..(16): 2'-deoxy-2'-fluoro
  misc_feature (17)..(17): 2'-O-methyl
  misc_feature (18)..(19): 2'-deoxy-2'-fluoro
  misc_feature (1)..(19): ribonucleotide modified as described
  misc_feature (20)..(21): internucleotide phosphorothioate linkage
ggacuaucccacgaacgcutt

SEQ ID NO: 1601 - DNA, 21 bp, Artificial Sequence
  Description of Artificial Sequence: synthetic
  misc_feature (1)..(2): 2'-deoxy-2'-fluoro
  misc_feature (3)..(3): 2'-O-methyl
  misc_feature (4)..(7): 2'-deoxy-2'-fluoro
  misc_feature (8)..(8): 2'-O-methyl
  misc_feature (9)..(9): 2'-deoxy-2'-fluoro
  misc_feature (10)..(12): 2'-O-methyl
  misc_feature (13)..(13): 2'-deoxy-2'-fluoro
  misc_feature (14)..(14): 2'-O-methyl
  misc_feature (15)..(17): 2'-deoxy-2'-fluoro
  misc_feature (18)..(18): 2'-O-methyl
  misc_feature (19)..(19): 2'-deoxy-2'-fluoro
  misc_feature (1)..(19): ribonucleotide modified as described
  misc_feature (20)..(21): internucleotide phosphorothioate linkage
cuaucccacgaacgcucactt

SEQ ID NO: 1602 - DNA, 21 bp, Artificial Sequence
  Description of Artificial Sequence: synthetic
  misc_feature (1)..(1): 2'-deoxy-2'-fluoro
  misc_feature (2)..(5): 2'-O-methyl
  misc_feature (6)..(11): 2'-deoxy-2'-fluoro
  misc_feature (12)..(15): 2'-O-methyl
  misc_feature (16)..(16): 2'-deoxy-2'-fluoro
  misc_feature (17)..(17): 2'-O-methyl
  misc_feature (18)..(19): 2'-deoxy-2'-fluoro
  misc_feature (1)..(19): ribonucleotide modified as described
  misc_feature (20)..(21): internucleotide phosphorothioate linkage
cggggcccuccagagcauctt

SEQ ID NO: 1603 - DNA, 21 bp, Artificial Sequence
  Description of Artificial Sequence: synthetic
  misc_feature (1)..(1): 5'-3 attached terminal deoxyabasic moiety
  misc_feature (1)..(4): 2'-deoxy-2'-fluoro
  misc_feature (11)..(14): 2'-deoxy-2'-fluoro
  misc_feature (16)..(16): 2'-deoxy-2'-fluoro
  misc_feature (1)..(19): ribonucleotide modified as described
  misc_feature (21)..(21): 3'-3 attached terminal deoxyabasic moiety
ccccgggaggucucguagatt

SEQ ID NO: 1604 - DNA, 21 bp, Artificial Sequence
  Description of Artificial Sequence: synthetic
  misc_feature (1)..(1): 5'-3 attached terminal deoxyabasic moiety
  misc_feature (4)..(4): 2'-deoxy-2'-fluoro
  misc_feature (6)..(9): 2'-deoxy-2'-fluoro
  misc_feature (16)..(19): 2'-deoxy-2'-fluoro
  misc_feature (1)..(19): ribonucleotide modified as described
  misc_feature (21)..(21): 3'-3 attached terminal deoxyabasic moiety
agaugcucuggagggcccctt

SEQ ID NO: 1605 - DNA, 21 bp, Artificial Sequence
  Description of Artificial Sequence: synthetic
  misc_feature (1)..(3): 2'-deoxy-2'-fluoro
  misc_feature (5)..(5): 2'-deoxy-2'-fluoro
  misc_feature (10)..(15): 2'-deoxy-2'-fluoro
  misc_feature (1)..(19): ribonucleotide modified as described
  misc_feature (20)..(21): internucleotide phosphorothioate linkage
ucuacgagaccucccggggtt

SEQ ID NO: 1606 - DNA, 21 bp, Artificial Sequence
  Description of Artificial Sequence: synthetic
  misc_feature (5)..(10): 2'-deoxy-2'-fluoro
  misc_feature (15)..(15): 2'-deoxy-2'-fluoro
  misc_feature (17)..(19): 2'-deoxy-2'-fluoro
  misc_feature (1)..(19): ribonucleotide modified as described
  misc_feature (20)..(21): internucleotide phosphorothioate linkage
ggggcccuccagagcaucutt

SEQ ID NO: 1607 - DNA, 21 bp, Artificial Sequence
  Description of Artificial Sequence: synthetic
  misc_feature (1)..(1): 5'-3 attached terminal deoxyabasic moiety
  misc_feature (1)..(4): 2'-deoxy-2'-fluoro
  misc_feature (5)..(10): 2'-deoxy
  misc_feature (11)..(14): 2'-deoxy-2'-fluoro
  misc_feature (15)..(15): 2'-deoxy
  misc_feature (16)..(16): 2'-deoxy-2'-fluoro
  misc_feature (17)..(19): 2'-deoxy
  misc_feature (1)..(19): ribonucleotide modified as described
  misc_feature (21)..(21): 3'-3 attached terminal deoxyabasic moiety
ccccgggaggucucguagatt

SEQ ID NO: 1608 - DNA, 21 bp, Artificial Sequence
  Description of Artificial Sequence: synthetic
  misc_feature (1)..(1): 5'-3 attached terminal deoxyabasic moiety
  misc_feature (1)..(3): 2'-deoxy
  misc_feature (4)..(4): 2'-deoxy-2'-fluoro
  misc_feature (5)..(5): 2'-deoxy
  misc_feature (6)..(9): 2'-deoxy-2'-fluoro
  misc_feature (10)..(15): 2'-deoxy
  misc_feature (16)..(19): 2'-deoxy-2'-fluoro
  misc_feature (1)..(19): ribonucleotide modified as described
  misc_feature (21)..(21): 3'-3 attached terminal deoxyabasic moiety
agaugcucuggagggcccctt

SEQ ID NO: 1609 - DNA, 21 bp, Artificial Sequence
  Description of Artificial Sequence: synthetic
  misc_feature (1)..(4): 2'-O-methyl
  misc_feature (5)..(10): 2'-deoxy-2'-fluoro
  misc_feature (11)..(14): 2'-O-methyl
  misc_feature (15)..(15): 2'-deoxy-2'-fluoro
  misc_feature (16)..(16): 2'-O-methyl
  misc_feature (17)..(19): 2'-deoxy-2'-fluoro
  misc_feature (1)..(19): ribonucleotide modified as described
  misc_feature (20)..(21): internucleotide phosphorothioate linkage
ggggcccuccagagcaucutt

SEQ ID NO: 1610 - DNA, 21 bp, Artificial Sequence
  Description of Artificial Sequence: synthetic
  misc_feature: 2'-deoxy-2'-fluoro
  misc_feature (1)..(3): 2'-deoxy-2'-fluoro
  misc_feature (5)..(5): 2'-deoxy-2'-fluoro
  misc_feature (10)..(15): 2'-deoxy-2'-fluoro
  misc_feature (1)..(19): ribonucleotide modified as described
  misc_feature (20)..(21): internucleotide phosphorothioate linkage
ucuacgagaccucccggggtt

SEQ ID NO: 1611 - DNA, 21 bp, Artificial Sequence
  Description of Artificial Sequence: synthetic
  misc_feature (1)..(4): 2'-deoxy
  misc_feature (5)..(10): 2'-deoxy-2'-fluoro
  misc_feature (11)..(14): 2'-deoxy
  misc_feature (15)..(15): 2'-deoxy-2'-fluoro
  misc_feature (16)..(16): 2'-deoxy
  misc_feature (17)..(19): 2'-deoxy-2'-fluoro
  misc_feature (1)..(19): ribonucleotide modified as described
  misc_feature (20)..(21): internucleotide phosphorothioate linkage
ggggcccuccagagcaucutt

SEQ ID NO: 1612 - DNA, 21 bp, Artificial Sequence
  Description of Artificial Sequence: synthetic
  misc_feature (1)..(1): 5'-3 attached terminal deoxyabasic moiety
  misc_feature (3)..(3): 2'-deoxy-2'-fluoro
  misc_feature (6)..(8): 2'-deoxy-2'-fluoro
  misc_feature (10)..(10): 2'-deoxy-2'-fluoro
  misc_feature (15)..(16): 2'-deoxy-2'-fluoro
  misc_feature (19)..(19): 2'-deoxy-2'-fluoro
  misc_feature (1)..(19): ribonucleotide modified as described
  misc_feature (21)..(21): 3'-3 attached terminal deoxyabasic moiety
aguggucugcggaaccggutt

SEQ ID NO: 1613 - DNA, 21 bp, Artificial Sequence
  Description of Artificial Sequence: synthetic
  misc_feature (1)..(1): 5'-3 attached terminal deoxyabasic moiety
  misc_feature (1)..(2): 2'-deoxy-2'-fluoro
  misc_feature (4)..(4): 2'-deoxy-2'-fluoro
  misc_feature (9)..(10): 2'-deoxy-2'-fluoro
  misc_feature (13)..(13): 2'-deoxy-2'-fluoro
  misc_feature (17)..(17): 2'-deoxy-2'-fluoro
  misc_feature (19)..(19): 2'-deoxy-2'-fluoro
  misc_feature (1)..(19): ribonucleotide modified as described
  misc_feature (21)..(21): 3'-3 attached terminal deoxyabasic moiety
cugcggaaccggugaguactt

SEQ ID NO: 1614 - DNA, 21 bp, Artificial Sequence
  Description of Artificial Sequence: synthetic
  misc_feature (1)..(1): 5'-3 attached terminal deoxyabasic moiety
  misc_feature (4)..(7): 2'-deoxy-2'-fluoro
  misc_feature (9)..(9): 2'-deoxy-2'-fluoro
  misc_feature (12)..(12): 2'-deoxy-2'-fluoro
  misc_feature (14)..(15): 2'-deoxy-2'-fluoro
  misc_feature (17)..(19): 2'-deoxy-2'-fluoro
  misc_feature (1)..(19): ribonucleotide modified as described
  misc_feature (21)..(21): 3'-3 attached terminal deoxyabasic moiety
aggccuugugguacugccutt

SEQ ID NO: 1615 - DNA, 21 bp, Artificial Sequence
  Description of Artificial Sequence: synthetic
  misc_feature (1)..(1): 5'-3 attached terminal deoxyabasic moiety
  misc_feature (1)..(3): 2'-deoxy-2'-fluoro
  misc_feature (5)..(5): 2'-deoxy-2'-fluoro
  misc_feature (8)..(8): 2'-deoxy-2'-fluoro
  misc_feature (10)..(11): 2'-deoxy-2'-fluoro
  misc_feature (13)..(15): 2'-deoxy-2'-fluoro
  misc_feature (18)..(18): 2'-deoxy-2'-fluoro
  misc_feature (1)..(19): ribonucleotide modified as described
  misc_feature (21)..(21): 3'-3 attached terminal deoxyabasic moiety
cuugugguacugccugauatt

SEQ ID NO: 1616 - DNA, 21 bp, Artificial Sequence
  Description of Artificial Sequence: synthetic
  misc_feature (1)..(1): 5'-3 attached terminal deoxyabasic moiety
  misc_feature (1)..(1): 2'-deoxy-2'-fluoro
  misc_feature (4)..(4): 2'-deoxy-2'-fluoro
  misc_feature (6)..(7): 2'-deoxy-2'-fluoro
  misc_feature (9)..(11): 2'-deoxy-2'-fluoro
  misc_feature (14)..(14): 2'-deoxy-2'-fluoro
  misc_feature (19)..(19): 2'-deoxy-2'-fluoro
  misc_feature (1)..(19): ribonucleotide modified as described
  misc_feature (21)..(21): 3'-3 attached terminal deoxyabasic moiety
ugguacugccugauagggutt

SEQ ID NO: 1617 - DNA, 21 bp, Artificial Sequence
  Description of Artificial Sequence: synthetic
  misc_feature (1)..(1): 5'-3 attached terminal deoxyabasic moiety
  misc_feature (3)..(3): 2'-deoxy-2'-fluoro
  misc_feature (5)..(6): 2'-deoxy-2'-fluoro
  misc_feature (8)..(10): 2'-deoxy-2'-fluoro
  misc_feature (13)..(13): 2'-deoxy-2'-fluoro
  misc_feature (18)..(18): 2'-deoxy-2'-fluoro
  misc_feature (1)..(19): ribonucleotide modified as described
  misc_feature (21)..(21): 3'-3 attached terminal deoxyabasic moiety
gguacugccugauagggugtt

SEQ ID NO: 1618 - DNA, 21 bp, Artificial Sequence
  Description of Artificial Sequence: synthetic
  misc_feature (1)..(1): 5'-3 attached terminal deoxyabasic moiety
  misc_feature (2)..(2): 2'-deoxy-2'-fluoro
  misc_feature (4)..(5): 2'-deoxy-2'-fluoro
  misc_feature (7)..(9): 2'-deoxy-2'-fluoro
  misc_feature (12)..(12): 2'-deoxy-2'-fluoro
  misc_feature (17)..(17): 2'-deoxy-2'-fluoro
  misc_feature (19)..(19): 2'-deoxy-2'-fluoro
  misc_feature (1)..(19): ribonucleotide modified as described
  misc_feature (21)..(21): 3'-3 attached terminal deoxyabasic moiety
guacugccugauagggugctt

SEQ ID NO: 1619 - DNA, 21 bp, Artificial Sequence
  Description of Artificial Sequence: synthetic
  misc_feature (1)..(1): 5'-3 attached terminal deoxyabasic moiety
  misc_feature (1)..(1): 2'-deoxy-2'-fluoro
  misc_feature (3)..(4): 2'-deoxy-2'-fluoro
  misc_feature (6)..(8): 2'-deoxy-2'-fluoro
  misc_feature (11)..(11): 2'-deoxy-2'-fluoro
  misc_feature (16)..(16): 2'-deoxy-2'-fluoro
  misc_feature (18)..(19): 2'-deoxy-2'-fluoro
  misc_feature (1)..(19): ribonucleotide modified as described
  misc_feature (21)..(21): 3'-3 attached terminal deoxyabasic moiety
uacugccugauagggugcutt

SEQ ID NO: 1620 - DNA, 21 bp, Artificial Sequence
  Description of Artificial Sequence: synthetic
  misc_feature (1)..(1): 5'-3 attached terminal deoxyabasic moiety
  misc_feature (1)..(2): 2'-deoxy-2'-fluoro
  misc_feature (4)..(6): 2'-deoxy-2'-fluoro
  misc_feature (9)..(9): 2'-deoxy-2'-fluoro
  misc_feature (14)..(14): 2'-deoxy-2'-fluoro
  misc_feature (16)..(18): 2'-deoxy-2'-fluoro
  misc_feature (1)..(19): ribonucleotide modified as described
  misc_feature (21)..(21): 3'-3 attached terminal deoxyabasic moiety
cugccugauagggugcuugtt

SEQ ID NO: 1621 - DNA, 21 bp, Artificial Sequence
  Description of Artificial Sequence: synthetic
  misc_feature (1)..(1): 5'-3 attached terminal deoxyabasic moiety
  misc_feature (1)..(1): 2'-deoxy-2'-fluoro
  misc_feature (3)..(5): 2'-deoxy-2'-fluoro
  misc_feature (8)..(8): 2'-deoxy-2'-fluoro
  misc_feature (13)..(13): 2'-deoxy-2'-fluoro
  misc_feature (15)..(17): 2'-deoxy-2'-fluoro
  misc_feature (19)..(19): 2'-deoxy-2'-fluoro
  misc_feature (1)..(19): ribonucleotide modified as described
  misc_feature (21)..(21): 3'-3 attached terminal deoxyabasic moiety
ugccugauagggugcuugctt

SEQ ID NO: 1622 - DNA, 21 bp, Artificial Sequence
  Description of Artificial Sequence: synthetic
  misc_feature (1)..(1): 5'-3 attached terminal deoxyabasic moiety
  misc_feature (1)..(3): 2'-deoxy-2'-fluoro
  misc_feature (6)..(6): 2'-deoxy-2'-fluoro
  misc_feature (11)..(11): 2'-deoxy-2'-fluoro
  misc_feature (13)..(15): 2'-deoxy-2'-fluoro
  misc_feature (17)..(17): 2'-deoxy-2'-fluoro
  misc_feature (1)..(19): ribonucleotide modified as described
  misc_feature (21)..(21): 3'-3 attached terminal deoxyabasic moiety
ccugauagggugcuugcgatt

SEQ ID NO: 1623 - DNA, 21 bp, Artificial Sequence
  Description of Artificial Sequence: synthetic
  misc_feature (1)..(1): 5'-3 attached terminal deoxyabasic moiety
  misc_feature (3)..(3): 2'-deoxy-2'-fluoro
  misc_feature (8)..(8): 2'-deoxy-2'-fluoro
  misc_feature (10)..(12): 2'-deoxy-2'-fluoro
  misc_feature (14)..(14): 2'-deoxy-2'-fluoro
  misc_feature (18)..(18): 2'-deoxy-2'-fluoro
  misc_feature (1)..(19): ribonucleotide modified as described
  misc_feature (21)..(21): 3'-3 attached terminal deoxyabasic moiety
gauagggugcuugcgagugtt

SEQ ID NO: 1624 - DNA, 21 bp, Artificial Sequence
  Description of Artificial Sequence: synthetic
  misc_feature (2)..(3): 2'-deoxy-2'-fluoro
  misc_feature (6)..(9): 2'-deoxy-2'-fluoro
  misc_feature (11)..(11): 2'-deoxy-2'-fluoro
  misc_feature (15)..(16): 2'-deoxy-2'-fluoro
  misc_feature (18)..(19): 2'-deoxy-2'-fluoro
  misc_feature (1)..(19): ribonucleotide modified as described
  misc_feature (20)..(21): internucleotide phosphorothioate linkage
accgguuccgcagaccacutt

SEQ ID NO: 1625 - DNA, 21 bp, Artificial Sequence
  Description of Artificial Sequence: synthetic
  misc_feature (2)..(2): 2'-deoxy-2'-fluoro
  misc_feature (4)..(6): 2'-deoxy-2'-fluoro
  misc_feature (8)..(9): 2'-deoxy-2'-fluoro
  misc_feature (12)..(15): 2'-deoxy-2'-fluoro
  misc_feature (17)..(17): 2'-deoxy-2'-fluoro
  misc_feature (1)..(19): ribonucleotide modified as described
  misc_feature (20)..(21): internucleotide phosphorothioate linkage
guacucaccgguuccgcagtt

SEQ ID NO: 1626 - DNA, 21 bp, Artificial Sequence
  Description of Artificial Sequence: synthetic
  misc_feature (4)..(4): 2'-deoxy-2'-fluoro
  misc_feature (7)..(7): 2'-deoxy-2'-fluoro
  misc_feature (9)..(10): 2'-deoxy-2'-fluoro
  misc_feature (12)..(12): 2'-deoxy-2'-fluoro
  misc_feature (17)..(19): 2'-deoxy-2'-fluoro
  misc_feature (1)..(19): ribonucleotide modified as described
  misc_feature (20)..(21): internucleotide phosphorothioate linkage
aggcaguaccacaaggccutt

SEQ ID NO: 1627 - DNA, 21 bp, Artificial Sequence
  Description of Artificial Sequence: synthetic
  misc_feature (1)..(1): 2'-deoxy-2'-fluoro
  misc_feature (3)..(4): 2'-deoxy-2'-fluoro
  misc_feature (8)..(8): 2'-deoxy-2'-fluoro
  misc_feature (11)..(11): 2'-deoxy-2'-fluoro
  misc_feature (13)..(14): 2'-deoxy-2'-fluoro
  misc_feature (16)..(16): 2'-deoxy-2'-fluoro
  misc_feature (1)..(19): ribonucleotide modified as described
  misc_feature (20)..(21): internucleotide phosphorothioate linkage
uaucaggcaguaccacaagtt

SEQ ID NO: 1628 - DNA, 21 bp, Artificial Sequence
  Description of Artificial Sequence: synthetic
  misc_feature (2)..(5): 2'-deoxy-2'-fluoro
  misc_feature (7)..(8): 2'-deoxy-2'-fluoro
  misc_feature (12)..(12): 2'-deoxy-2'-fluoro
  misc_feature (15)..(15): 2'-deoxy-2'-fluoro
  misc_feature (17)..(18): 2'-deoxy-2'-fluoro
  misc_feature (1)..(19): ribonucleotide modified as described
  misc_feature (20)..(21): internucleotide phosphorothioate linkage
acccuaucaggcaguaccatt

SEQ ID NO: 1629 - DNA, 21 bp, Artificial Sequence
  Description of Artificial Sequence: synthetic
  misc_feature (1)..(1): 2'-deoxy-2'-fluoro
  misc_feature (3)..(6): 2'-deoxy-2'-fluoro
  misc_feature (8)..(9): 2'-deoxy-2'-fluoro
  misc_feature (13)..(13): 2'-deoxy-2'-fluoro
  misc_feature (16)..(16): 2'-deoxy-2'-fluoro
  misc_feature (18)..(19): 2'-deoxy-2'-fluoro
  misc_feature (1)..(19): ribonucleotide modified as described
  misc_feature (20)..(21): internucleotide phosphorothioate linkage
cacccuaucaggcaguacctt

SEQ ID NO: 1630 - DNA, 21 bp, Artificial Sequence
  Description of Artificial Sequence: synthetic
  misc_feature (2)..(2): 2'-deoxy-2'-fluoro
  misc_feature (4)..(7): 2'-deoxy-2'-fluoro
  misc_feature (9)..(10): 2'-deoxy-2'-fluoro
  misc_feature (14)..(14): 2'-deoxy-2'-fluoro
  misc_feature (17)..(17): 2'-deoxy-2'-fluoro
  misc_feature (19)..(19): 2'-deoxy-2'-fluoro
  misc_feature (1)..(19): ribonucleotide modified as described
  misc_feature (20)..(21): internucleotide phosphorothioate linkage
gcacccuaucaggcaguactt

SEQ ID NO: 1631 - DNA, 21 bp, Artificial Sequence
  Description of Artificial Sequence: synthetic
  misc_feature (3)..(3): 2'-deoxy-2'-fluoro
  misc_feature (5)..(8): 2'-deoxy-2'-fluoro
  misc_feature (10)..(11): 2'-deoxy-2'-fluoro
  misc_feature (15)..(15): 2'-deoxy-2'-fluoro
  misc_feature (18)..(18): 2'-deoxy-2'-fluoro
  misc_feature (1)..(19): ribonucleotide modified as described
  misc_feature (20)..(21): internucleotide phosphorothioate linkage
agcacccuaucaggcaguatt

SEQ ID NO: 1632 - DNA, 21 bp, Artificial Sequence
  Description of Artificial Sequence: synthetic
  misc_feature (1)..(1): 2'-deoxy-2'-fluoro
  misc_feature (5)..(5): 2'-deoxy-2'-fluoro
  misc_feature (7)..(10): 2'-deoxy-2'-fluoro
  misc_feature (12)..(13): 2'-deoxy-2'-fluoro
  misc_feature (17)..(17): 2'-deoxy-2'-fluoro
  misc_feature (1)..(19): ribonucleotide modified as described
  misc_feature (20)..(21): internucleotide phosphorothioate linkage
caagcacccuaucaggcagtt

SEQ ID NO: 1633 - DNA, 21 bp, Artificial Sequence
  Description of Artificial Sequence: synthetic
  misc_feature (2)..(2): 2'-deoxy-2'-fluoro
  misc_feature (6)..(6): 2'-deoxy-2'-fluoro
  misc_feature (8)..(11): 2'-deoxy-2'-fluoro
  misc_feature (13)..(14): 2'-deoxy-2'-fluoro
  misc_feature (18)..(18): 2'-deoxy-2'-fluoro
  misc_feature (1)..(19): ribonucleotide modified as described
  misc_feature (20)..(21): internucleotide phosphorothioate linkage
gcaagcacccuaucaggcatt

SEQ ID NO: 1634 - DNA, 21 bp, Artificial Sequence
  Description of Artificial Sequence: synthetic
  misc_feature (1)..(2): 2'-deoxy-2'-fluoro
  misc_feature (4)..(4): 2'-deoxy-2'-fluoro
  misc_feature (8)..(8): 2'-deoxy-2'-fluoro
  misc_feature (10)..(13): 2'-deoxy-2'-fluoro
  misc_feature (15)..(16): 2'-deoxy-2'-fluoro
  misc_feature (1)..(19): ribonucleotide modified as described
  misc_feature (20)..(21): internucleotide phosphorothioate linkage
ucgcaagcacccuaucaggtt

SEQ ID NO: 1635 - DNA, 21 bp, Artificial Sequence
  Description of Artificial Sequence: synthetic
  misc_feature (1)..(1): 2'-deoxy-2'-fluoro
  misc_feature (3)..(5): 2'-deoxy-2'-fluoro
  misc_feature (7)..(7): 2'-deoxy-2'-fluoro
  misc_feature (11)..(11): 2'-deoxy-2'-fluoro
  misc_feature (13)..(16): 2'-deoxy-2'-fluoro
  misc_feature (18)..(19): 2'-deoxy-2'-fluoro
  misc_feature (1)..(19): ribonucleotide modified as described
  misc_feature (20)..(21): internucleotide phosphorothioate linkage
cacucgcaagcacccuauctt

SEQ ID NO: 1636 - DNA, 21 bp, Artificial Sequence
  Description of Artificial Sequence: synthetic
  misc_feature (1)..(1): 5'-3 attached terminal deoxyabasic moiety
  misc_feature (1)..(1): 2'-deoxy-2'-fluoro
  misc_feature (4)..(5): 2'-deoxy-2'-fluoro
  misc_feature (10)..(10): 2'-deoxy-2'-fluoro
  misc_feature (12)..(14): 2'-deoxy-2'-fluoro
  misc_feature (17)..(17): 2'-deoxy-2'-fluoro
  misc_feature (1)..(19): ribonucleotide modified as described
  misc_feature (21)..(21): 3'-3 attached terminal deoxyabasic moiety
uggccaaggcgucuggugatt

SEQ ID NO: 1637 - DNA, 21 bp, Artificial Sequence
  Description of Artificial Sequence: synthetic
  misc_feature (1)..(1): 5'-3 attached terminal deoxyabasic moiety
  misc_feature (1)..(1): 2'-deoxy-2'-fluoro
  misc_feature (3)..(3): 2'-deoxy-2'-fluoro
  misc_feature (7)..(7): 2'-deoxy-2'-fluoro
  misc_feature (10)..(11): 2'-deoxy-2'-fluoro
  misc_feature (16)..(16): 2'-deoxy-2'-fluoro
  misc_feature (18)..(19): 2'-deoxy-2'-fluoro
  misc_feature (1)..(19): ribonucleotide modified as described
  misc_feature (21)..(21): 3'-3 attached terminal deoxyabasic moiety
caugaguggccaaggcguctt

SEQ ID NO: 1638 - DNA, 21 bp, Artificial Sequence
  Description of Artificial Sequence: synthetic
  misc_feature (1)..(1): 5'-3 attached terminal deoxyabasic moiety
  misc_feature (1)..(3): 2'-deoxy-2'-fluoro
  misc_feature (5)..(6): 2'-deoxy-2'-fluoro
  misc_feature (8)..(8): 2'-deoxy-2'-fluoro
  misc_feature (11)..(11): 2'-deoxy-2'-fluoro
  misc_feature (13)..(16): 2'-deoxy-2'-fluoro
  misc_feature (1)..(19): ribonucleotide modified as described
  misc_feature (21)..(21): 3'-3 attached terminal deoxyabasic moiety
uccgucaugguguuccggatt

SEQ ID NO: 1639 - DNA, 21 bp, Artificial Sequence
  Description of Artificial Sequence: synthetic
  misc_feature (1)..(1): 5'-3 attached terminal deoxyabasic moiety
  misc_feature (2)..(2): 2'-deoxy-2'-fluoro
  misc_feature (5)..(7): 2'-deoxy-2'-fluoro
  misc_feature (9)..(10): 2'-deoxy-2'-fluoro
  misc_feature (12)..(12): 2'-deoxy-2'-fluoro
  misc_feature (15)..(15): 2'-deoxy-2'-fluoro
  misc_feature (17)..(19): 2'-deoxy-2'-fluoro
  misc_feature (1)..(19): ribonucleotide modified as described
  misc_feature (21)..(21): 3'-3 attached terminal deoxyabasic moiety
auaguccgucaugguguuctt

SEQ ID NO: 1640 - DNA, 21 bp, Artificial Sequence
  Description of Artificial Sequence: synthetic
  misc_feature (1)..(1): 5'-3 attached terminal deoxyabasic moiety
  misc_feature (1)..(1): 2'-deoxy-2'-fluoro
  misc_feature (6)..(6): 2'-deoxy-2'-fluoro
  misc_feature (8)..(11): 2'-deoxy-2'-fluoro
  misc_feature (13)..(14): 2'-deoxy-2'-fluoro
  misc_feature (16)..(16): 2'-deoxy-2'-fluoro
  misc_feature (19)..(19): 2'-deoxy-2'-fluoro
  misc_feature (1)..(19): ribonucleotide modified as described
  misc_feature (21)..(21): 3'-3 attached terminal deoxyabasic moiety
ugggauaguccgucauggutt

SEQ ID NO: 1641 - DNA, 21 bp, Artificial Sequence
  Description of Artificial Sequence: synthetic
  misc_feature (1)..(1): 5'-3 attached terminal deoxyabasic moiety
  misc_feature (2)..(2): 2'-deoxy-2'-fluoro
  misc_feature (7)..(7): 2'-deoxy-2'-fluoro
  misc_feature (10)..(12): 2'-deoxy-2'-fluoro
  misc_feature (14)..(15): 2'-deoxy-2'-fluoro
  misc_feature (17)..(17): 2'-deoxy-2'-fluoro
  misc_feature (1)..(19): ribonucleotide modified as described
  misc_feature (21)..(21): 3'-3 attached terminal deoxyabasic moiety
gugggauaguccgucauggtt

SEQ ID NO: 1642 - DNA, 21 bp, Artificial Sequence
  Description of Artificial Sequence: synthetic
  misc_feature (1)..(1): 5'-3 attached terminal deoxyabasic moiety
  misc_feature (1)..(1): 2'-deoxy-2'-fluoro
  misc_feature (3)..(3): 2'-deoxy-2'-fluoro
  misc_feature (8)..(8): 2'-deoxy-2'-fluoro
  misc_feature (11)..(13): 2'-deoxy-2'-fluoro
  misc_feature (15)..(16): 2'-deoxy-2'-fluoro
  misc_feature (18)..(18): 2'-deoxy-2'-fluoro
  misc_feature (1)..(19): ribonucleotide modified as described
  misc_feature (21)..(21): 3'-3 attached terminal deoxyabasic moiety
cgugggauaguccgucaugtt

SEQ ID NO: 1643 - DNA, 21 bp, Artificial Sequence
  Description of Artificial Sequence: synthetic
  misc_feature (1)..(1): 5'-3 attached terminal deoxyabasic moiety
  misc_feature (1)..(2): 2'-deoxy-2'-fluoro
  misc_feature (4)..(4): 2'-deoxy-2'-fluoro
  misc_feature (9)..(9): 2'-deoxy-2'-fluoro
  misc_feature (12)..(14): 2'-deoxy-2'-fluoro
  misc_feature (16)..(17): 2'-deoxy-2'-fluoro
  misc_feature (19)..(19): 2'-deoxy-2'-fluoro
  misc_feature (1)..(19): ribonucleotide modified as described
  misc_feature (21)..(21): 3'-3 attached terminal deoxyabasic moiety
ucgugggauaguccgucautt

SEQ ID NO: 1644 - DNA, 21 bp, Artificial Sequence
  Description of Artificial Sequence: synthetic
  misc_feature (1)..(1): 5'-3 attached terminal deoxyabasic moiety
  misc_feature (2)..(4): 2'-deoxy-2'-fluoro
  misc_feature (6)..(6): 2'-deoxy-2'-fluoro
  misc_feature (11)..(11): 2'-deoxy-2'-fluoro
  misc_feature (14)..(16): 2'-deoxy-2'-fluoro
  misc_feature (18)..(19): 2'-deoxy-2'-fluoro
  misc_feature (1)..(19): ribonucleotide modified as described
  misc_feature (21)..(21): 3'-3 attached terminal deoxyabasic moiety
guucgugggauaguccguctt

SEQ ID NO: 1645 - DNA, 21 bp, Artificial Sequence
  Description of Artificial Sequence: synthetic
  misc_feature (1)..(1): 5'-3 attached terminal deoxyabasic moiety
  misc_feature (1)..(1): 2'-deoxy-2'-fluoro
  misc_feature (3)..(5): 2'-deoxy-2'-fluoro
  misc_feature (7)..(7): 2'-deoxy-2'-fluoro
  misc_feature (12)..(12): 2'-deoxy-2'-fluoro
  misc_feature (15)..(17): 2'-deoxy-2'-fluoro
  misc_feature (19)..(19): 2'-deoxy-2'-fluoro
  misc_feature (1)..(19): ribonucleotide modified as described
  misc_feature (21)..(21): 3'-3 attached terminal deoxyabasic moiety
cguucgugggauaguccgutt

SEQ ID NO: 1646 - DNA, 21 bp, Artificial Sequence
  Description of Artificial Sequence: synthetic
  misc_feature (1)..(1): 5'-3 attached terminal deoxyabasic moiety
  misc_feature (3)..(3): 2'-deoxy-2'-fluoro
  misc_feature (5)..(7): 2'-deoxy-2'-fluoro
  misc_feature (9)..(9): 2'-deoxy-2'-fluoro
  misc_feature (14)..(14): 2'-deoxy-2'-fluoro
  misc_feature (17)..(19): 2'-deoxy-2'-fluoro
  misc_feature (1)..(19): ribonucleotide modified as described
  misc_feature (21)..(21): 3'-3 attached terminal deoxyabasic moiety
agcguucgugggauagucctt

SEQ ID NO: 1647 - DNA, 21 bp, Artificial Sequence
  Description of Artificial Sequence: synthetic
  misc_feature (1)..(1): 5'-3 attached terminal deoxyabasic moiety
  misc_feature (2)..(2): 2'-deoxy-2'-fluoro
  misc_feature (6)..(6): 2'-deoxy-2'-fluoro
  misc_feature (8)..(10): 2'-deoxy-2'-fluoro
  misc_feature (12)..(12): 2'-deoxy-2'-fluoro
  misc_feature (17)..(17): 2'-deoxy-2'-fluoro
  misc_feature (1)..(19): ribonucleotide modified as described
  misc_feature (21)..(21): 3'-3 attached terminal deoxyabasic moiety
gugagcguucgugggauagtt

SEQ ID NO: 1648 - DNA, 21 bp, Artificial Sequence
  Description of Artificial Sequence: synthetic
  misc_feature (1)..(2): 2'-deoxy-2'-fluoro
  misc_feature (4)..(5): 2'-deoxy-2'-fluoro
  misc_feature (9)..(9): 2'-deoxy-2'-fluoro
  misc_feature (11)..(14): 2'-deoxy-2'-fluoro
  misc_feature (17)..(18): 2'-deoxy-2'-fluoro
  misc_feature (1)..(19): ribonucleotide modified as described
  misc_feature (20)..(21): internucleotide phosphorothioate linkage
ucaccagacgccuuggccatt

SEQ ID NO: 1649 - DNA, 21 bp, Artificial Sequence
  Description of Artificial Sequence: synthetic
  misc_feature (2)..(3): 2'-deoxy-2'-fluoro
  misc_feature (5)..(8): 2'-deoxy-2'-fluoro
  misc_feature (11)..(12): 2'-deoxy-2'-fluoro
  misc_feature (14)..(16): 2'-deoxy-2'-fluoro
  misc_feature (18)..(18): 2'-deoxy-2'-fluoro
  misc_feature (1)..(19): ribonucleotide modified as described
  misc_feature (20)..(21): internucleotide phosphorothioate linkage
gacgccuuggccacucaugtt

SEQ ID NO: 1650 - DNA, 21 bp, Artificial Sequence
  Description of Artificial Sequence: synthetic
  misc_feature (1)..(3): 2'-deoxy-2'-fluoro
  misc_feature (8)..(8): 2'-deoxy-2'-fluoro
  misc_feature (10)..(11): 2'-deoxy-2'-fluoro
  misc_feature (13)..(13): 2'-deoxy-2'-fluoro
  misc_feature (16)..(16): 2'-deoxy-2'-fluoro
  misc_feature (1)..(19): ribonucleotide modified as described
  misc_feature (20)..(21): internucleotide phosphorothioate linkage
uccggaacaccaugacggatt

SEQ ID NO: 1651 - DNA, 21 bp, Artificial Sequence
  Description of Artificial Sequence: synthetic
  misc_feature (4)..(4): 2'-deoxy-2'-fluoro
  misc_feature (6)..(7): 2'-deoxy-2'-fluoro
  misc_feature (9)..(9): 2'-deoxy-2'-fluoro
  misc_feature (12)..(12): 2'-deoxy-2'-fluoro
  misc_feature (16)..(17): 2'-deoxy-2'-fluoro
  misc_feature (19)..(19): 2'-deoxy-2'-fluoro
  misc_feature (1)..(19): ribonucleotide modified as described
  misc_feature (20)..(21): internucleotide phosphorothioate linkage
gaacaccaugacggacuautt

SEQ ID NO: 1652 - DNA, 21 bp, Artificial Sequence
  Description of Artificial Sequence: synthetic
  misc_feature (2)..(3): 2'-deoxy-2'-fluoro
  misc_feature (5)..(5): 2'-deoxy-2'-fluoro
  misc_feature (8)..(8): 2'-deoxy-2'-fluoro
  misc_feature (12)..(13): 2'-deoxy-2'-fluoro
  misc_feature (15)..(18): 2'-deoxy-2'-fluoro
  misc_feature (1)..(19): ribonucleotide modified as described
  misc_feature (20)..(21): internucleotide phosphorothioate linkage
accaugacggacuaucccatt

SEQ ID NO: 1653 - DNA, 21 bp, Artificial Sequence
  Description of Artificial Sequence: synthetic
  misc_feature (1)..(2): 2'-deoxy-2'-fluoro
  misc_feature (4)..(4): 2'-deoxy-2'-fluoro
  misc_feature (7)..(7): 2'-deoxy-2'-fluoro
  misc_feature (11)..(12): 2'-deoxy-2'-fluoro
  misc_feature (14)..(17): 2'-deoxy-2'-fluoro
  misc_feature (19)..(19): 2'-deoxy-2'-fluoro
  misc_feature (1)..(19): ribonucleotide modified as described
  misc_feature (20)..(21): internucleotide phosphorothioate linkage
ccaugacggacuaucccactt

SEQ ID NO: 1654 - DNA, 21 bp, Artificial Sequence
  Description of Artificial Sequence: synthetic
  misc_feature (1)..(1): 2'-deoxy-2'-fluoro
  misc_feature (3)..(3): 2'-deoxy-2'-fluoro
  misc_feature (6)..(6): 2'-deoxy-2'-fluoro
  misc_feature (10)..(11): 2'-deoxy-2'-fluoro
  misc_feature (13)..(16): 2'-deoxy-2'-fluoro
  misc_feature (18)..(18): 2'-deoxy-2'-fluoro
  misc_feature (1)..(19): ribonucleotide modified as described
  misc_feature (20)..(21): internucleotide phosphorothioate linkage
caugacggacuaucccacgtt

SEQ ID NO: 1655 - DNA, 21 bp, Artificial Sequence
  Description of Artificial Sequence: synthetic
  misc_feature (2)..(2): 2'-deoxy-2'-fluoro
  misc_feature (5)..(5): 2'-deoxy-2'-fluoro
  misc_feature (9)..(10): 2'-deoxy-2'-fluoro
  misc_feature (12)..(15): 2'-deoxy-2'-fluoro
  misc_feature (17)..(17): 2'-deoxy-2'-fluoro
  misc_feature (1)..(19): ribonucleotide modified as described
  misc_feature (20)..(21): internucleotide phosphorothioate linkage
augacggacuaucccacgatt

SEQ ID NO: 1656 - DNA, 21 bp, Artificial Sequence
  Description of Artificial Sequence: synthetic
  misc_feature (3)..(3): 2'-deoxy-2'-fluoro
  misc_feature (7)..(8): 2'-deoxy-2'-fluoro
  misc_feature (10)..(13): 2'-deoxy-2'-fluoro
  misc_feature (15)..(15): 2'-deoxy-2'-fluoro
  misc_feature (19)..(19): 2'-deoxy-2'-fluoro
  misc_feature (1)..(19): ribonucleotide modified as described
  misc_feature (20)..(21): internucleotide phosphorothioate linkage
gacggacuaucccacgaactt

SEQ ID NO: 1657 - DNA, 21 bp, Artificial Sequence
  Description of Artificial Sequence: synthetic
  misc_feature (2)..(2): 2'-deoxy-2'-fluoro
  misc_feature (6)..(7): 2'-deoxy-2'-fluoro
  misc_feature (9)..(12): 2'-deoxy-2'-fluoro
  misc_feature (14)..(14): 2'-deoxy-2'-fluoro
  misc_feature (18)..(18): 2'-deoxy-2'-fluoro
  misc_feature (1)..(19): ribonucleotide modified as described
  misc_feature (20)..(21): internucleotide phosphorothioate linkage
acggacuaucccacgaacgtt

SEQ ID NO: 1658 - DNA, 21 bp, Artificial Sequence
  Description of Artificial Sequence: synthetic
  misc_feature (4)..(5): 2'-deoxy-2'-fluoro
  misc_feature (7)..(10): 2'-deoxy-2'-fluoro
  misc_feature (12)..(12): 2'-deoxy-2'-fluoro
  misc_feature (16)..(16): 2'-deoxy-2'-fluoro
  misc_feature (18)..(19): 2'-deoxy-2'-fluoro
  misc_feature (1)..(19): ribonucleotide modified as described
  misc_feature (20)..(21): internucleotide phosphorothioate linkage
ggacuaucccacgaacgcutt

SEQ ID NO: 1659 - DNA, 21 bp, Artificial Sequence
  Description of Artificial Sequence: synthetic
  misc_feature (1)..(2): 2'-deoxy-2'-fluoro
  misc_feature (4)..(7): 2'-deoxy-2'-fluoro
  misc_feature (9)..(9): 2'-deoxy-2'-fluoro
  misc_feature (13)..(13): 2'-deoxy-2'-fluoro
  misc_feature (15)..(17): 2'-deoxy-2'-fluoro
  misc_feature (19)..(19): 2'-deoxy-2'-fluoro
  misc_feature (1)..(19): ribonucleotide modified as described
  misc_feature (20)..(21): internucleotide phosphorothioate linkage
cuaucccacgaacgcucactt

SEQ ID NO: 1660 - DNA, 21 bp, Artificial Sequence
  Description of Artificial Sequence: synthetic
  misc_feature (1)..(1): 5'-3 attached terminal deoxyabasic moiety
  misc_feature (2)..(10): 2'-deoxy-2'-fluoro
  misc_feature (14)..(15): 2'-deoxy-2'-fluoro
  misc_feature (18)..(19): 2'-deoxy-2'-fluoro
  misc_feature (1)..(19): ribonucleotide modified as described
  misc_feature (21)..(21): 3'-3 attached terminal deoxyabasic moiety
guccuuucuuggaucaacctt

SEQ ID NO: 1661 - DNA, 21 bp, Artificial Sequence
  Description of Artificial Sequence: synthetic
  misc_feature (1)..(1): 5'-3 attached terminal deoxyabasic moiety
  misc_feature (1)..(9): 2'-deoxy-2'-fluoro
  misc_feature (13)..(14): 2'-deoxy-2'-fluoro
  misc_feature (17)..(19): 2'-deoxy-2'-fluoro
  misc_feature (1)..(19): ribonucleotide modified as described
  misc_feature (21)..(21): 3'-3 attached terminal deoxyabasic moiety
uccuuucuuggaucaaccctt

SEQ ID NO: 1662 - DNA, 21 bp, Artificial Sequence
  Description of Artificial Sequence: synthetic
  misc_feature (1)..(1): 5'-3 attached terminal deoxyabasic moiety
  misc_feature (3)..(11): 2'-deoxy-2'-fluoro
  misc_feature (15)..(16): 2'-deoxy-2'-fluoro
  misc_feature (19)..(19): 2'-deoxy-2'-fluoro
  misc_feature (1)..(19): ribonucleotide modified as described
  misc_feature (21)..(21): 3'-3 attached terminal deoxyabasic moiety
gguccuuucuuggaucaactt

SEQ ID NO: 1663 - DNA, 21 bp, Artificial Sequence
  Description of Artificial Sequence: synthetic
  misc_feature (1)..(1): 5'-3 attached terminal deoxyabasic moiety
  misc_feature (1)..(2): 2'-deoxy-2'-fluoro
  misc_feature (6)..(14): 2'-deoxy-2'-fluoro
  misc_feature (18)..(19): 2'-deoxy-2'-fluoro
  misc_feature (1)..(19): ribonucleotide modified as described
  misc_feature (21)..(21): 3'-3 attached terminal deoxyabasic moiety
ccggguccuuucuuggauctt

SEQ ID NO: 1664 - DNA, 21 bp, Artificial Sequence
  Description of Artificial Sequence: synthetic
  misc_feature (3)..(4): 2'-deoxy-2'-fluoro
  misc_feature (7)..(9): 2'-deoxy-2'-fluoro
  misc_feature (19)..(19): 2'-deoxy-2'-fluoro
  misc_feature (1)..(19): ribonucleotide modified as described
  misc_feature (20)..(21): internucleotide phosphorothioate linkage
gguugauccaagaaaggactt

SEQ ID NO: 1665 - DNA, 21 bp, Artificial Sequence
  Description of Artificial Sequence: synthetic
  misc_feature (4)..(5): 2'-deoxy-2'-fluoro
  misc_feature (8)..(10): 2'-deoxy-2'-fluoro
  misc_feature (1)..(19): ribonucleotide modified as described
  misc_feature (20)..(21): internucleotide phosphorothioate linkage
ggguugauccaagaaaggatt

SEQ ID NO: 1666 - DNA, 21 bp, Artificial Sequence
  Description of Artificial Sequence: synthetic
  misc_feature (2)..(3): 2'-deoxy-2'-fluoro
  misc_feature (6)..(8): 2'-deoxy-2'-fluoro
  misc_feature (18)..(19): 2'-deoxy-2'-fluoro
  misc_feature (1)..(19): ribonucleotide modified as described
  misc_feature (20)..(21): internucleotide phosphorothioate linkage
guugauccaagaaaggacctt

SEQ ID NO: 1667 - DNA, 21 bp, Artificial Sequence
  Description of Artificial Sequence: synthetic
  misc_feature (3)..(5): 2'-deoxy-2'-fluoro
  misc_feature (15)..(17): 2'-deoxy-2'-fluoro
  misc_feature (1)..(19): ribonucleotide modified as described
  misc_feature (20)..(21): internucleotide phosphorothioate linkage
gauccaagaaaggacccggtt

SEQ ID NO: 1668 - DNA, 21 bp, Artificial Sequence
  Description of Artificial Sequence: synthetic
  misc_feature (1)..(1): 5'-3 attached terminal deoxyabasic moiety
  misc_feature (1)..(2): 2'-deoxy-2'-fluoro
  misc_feature (5)..(6): 2'-deoxy-2'-fluoro
  misc_feature (10)..(18): 2'-deoxy-2'-fluoro
  misc_feature (1)..(19): ribonucleotide modified as described
  misc_feature (21)..(21): 3'-3 attached terminal deoxyabasic moiety
ccaacuagguucuuuccugtt

SEQ ID NO: 1669 - DNA, 21 bp, Artificial Sequence
  Description of Artificial Sequence: synthetic
  misc_feature (1)..(1): 5'-3 attached terminal deoxyabasic moiety
  misc_feature (1)..(3): 2'-deoxy-2'-fluoro
  misc_feature (6)..(7): 2'-deoxy-2'-fluoro
  misc_feature (11)..(19): 2'-deoxy-2'-fluoro
  misc_feature (1)..(19): ribonucleotide modified as described
  misc_feature (21)..(21): 3'-3 attached terminal deoxyabasic moiety
cccaacuagguucuuuccutt

SEQ ID NO: 1670 - DNA, 21 bp, Artificial Sequence
  Description of Artificial Sequence: synthetic
  misc_feature (1)..(1): 5'-3 attached terminal deoxyabasic moiety
  misc_feature (1)..(1): 2'-deoxy-2'-fluoro
  misc_feature (4)..(5): 2'-deoxy-2'-fluoro
  misc_feature (9)..(17): 2'-deoxy-2'-fluoro
  misc_feature (1)..(19): ribonucleotide modified as described
  misc_feature (21)..(21): 3'-3 attached terminal deoxyabasic moiety
caacuagguucuuuccuggtt

SEQ ID NO: 1671 - DNA, 21 bp, Artificial Sequence
  Description of Artificial Sequence: synthetic
  misc_feature (1)..(1): 5'-3 attached terminal deoxyabasic moiety
  misc_feature (1)..(2): 2'-deoxy-2'-fluoro
  misc_feature (6)..(14): 2'-deoxy-2'-fluoro
  misc_feature (18)..(19): 2'-deoxy-2'-fluoro
  misc_feature (1)..(19): ribonucleotide modified as described
  misc_feature (21)..(21): 3'-3 attached terminal deoxyabasic moiety
cuagguucuuuccugggcctt

SEQ ID NO: 1672 - DNA, 21 bp, Artificial Sequence
  Description of Artificial Sequence: synthetic
  misc_feature (1)..(1): 2'-deoxy-2'-fluoro
  misc_feature (11)..(13): 2'-deoxy-2'-fluoro
  misc_feature (16)..(17): 2'-deoxy-2'-fluoro
  misc_feature (1)..(19): ribonucleotide modified as described
  misc_feature (20)..(21): internucleotide phosphorothioate linkage
caggaaagaaccuaguuggtt

SEQ ID NO: 1673 - DNA, 21 bp, Artificial Sequence
  Description of Artificial Sequence: synthetic
  misc_feature (10)..(12): 2'-deoxy-2'-fluoro
  misc_feature (15)..(16): 2'-deoxy-2'-fluoro
  misc_feature (1)..(19): ribonucleotide modified as described
  misc_feature (20)..(21): internucleotide phosphorothioate linkage
aggaaagaaccuaguugggtt

SEQ ID NO: 1674 - DNA, 21 bp, Artificial Sequence
  Description of Artificial Sequence: synthetic
  misc_feature (1)..(2): 2'-deoxy-2'-fluoro
  misc_feature (12)..(14): 2'-deoxy-2'-fluoro
  misc_feature (17)..(18): 2'-deoxy-2'-fluoro
  misc_feature (1)..(19): ribonucleotide modified as described
  misc_feature (20)..(21): internucleotide phosphorothioate linkage
ccaggaaagaaccuaguugtt

SEQ ID NO: 1675 - DNA, 21 bp, Artificial Sequence
  Description of Artificial Sequence: synthetic
  misc_feature (3)..(5): 2'-deoxy-2'-fluoro
  misc_feature (15)..(17): 2'-deoxy-2'-fluoro
  misc_feature (1)..(19): ribonucleotide modified as described
  misc_feature (20)..(21): internucleotide phosphorothioate linkage
ggcccaggaaagaaccuagtt

SEQ ID NO: 1676 - DNA, 21 bp, Artificial Sequence
  Description of Artificial Sequence: synthetic
  misc_feature (1)..(1): 5'-3 attached terminal deoxyabasic moiety
  misc_feature (1)..(3): 2'-deoxy-2'-fluoro
  misc_feature (4)..(9): 2'-deoxy
  misc_feature (10)..(13): 2'-deoxy-2'-fluoro
  misc_feature (14)..(14): 2'-deoxy
  misc_feature (15)..(15): 2'-deoxy-2'-fluoro
  misc_feature (16)..(18): 2'-deoxy
  misc_feature (19)..(19): 2'-deoxy-2'-fluoro
  misc_feature (1)..(19): ribonucleotide modified as described
  misc_feature (21)..(21): 3'-3 attached terminal deoxyabasic moiety
cccgggaggucucguagactt

SEQ ID NO: 1677 - DNA, 21 bp, Artificial Sequence
  Description of Artificial Sequence: synthetic
  misc_feature (1)..(1): 5'-3 attached terminal deoxyabasic moiety
  misc_feature (1)..(2): 2'-deoxy-2'-fluoro
  misc_feature (3)..(8): 2'-deoxy
  misc_feature (9)..(12): 2'-deoxy-2'-fluoro
  misc_feature (13)..(13): 2'-deoxy
  misc_feature (14)..(14): 2'-deoxy-2'-fluoro
  misc_feature (15)..(17): 2'-deoxy
  misc_feature (18)..(19): 2'-deoxy-2'-fluoro
  misc_feature (1)..(19): ribonucleotide modified as described
  misc_feature (21)..(21): 3'-3 attached terminal deoxyabasic moiety
ccgggaggucucguagacctt

SEQ ID NO: 1678 - DNA, 21 bp, Artificial Sequence
  Description of Artificial Sequence: synthetic
  misc_feature (1)..(1): 5'-3 attached terminal deoxyabasic moiety
  misc_feature (1)..(1): 2'-deoxy-2'-fluoro
  misc_feature (2)..(7): 2'-deoxy
  misc_feature (8)..(11): 2'-deoxy-2'-fluoro
  misc_feature (12)..(12): 2'-deoxy
  misc_feature (13)..(13): 2'-deoxy-2'-fluoro
  misc_feature (14)..(16): 2'-deoxy
  misc_feature (17)..(18): 2'-deoxy-2'-fluoro
  misc_feature (19)..(19): 2'-deoxy
  misc_feature (1)..(19): ribonucleotide modified as described
  misc_feature (21)..(21): 3'-3 attached terminal deoxyabasic moiety
cgggaggucucguagaccgtt

SEQ ID NO: 1679 - DNA, 21 bp, Artificial Sequence
  Description of Artificial Sequence: synthetic
  misc_feature (1)..(1): 5'-3 attached terminal deoxyabasic moiety
  misc_feature (1)..(6): 2'-deoxy
  misc_feature (7)..(10): 2'-deoxy-2'-fluoro
  misc_feature (11)..(11): 2'-deoxy
  misc_feature (12)..(12): 2'-deoxy-2'-fluoro
  misc_feature (13)..(15): 2'-deoxy
  misc_feature (16)..(17): 2'-deoxy-2'-fluoro
  misc_feature (18)..(18): 2'-deoxy
  misc_feature (19)..(19): 2'-deoxy-2'-fluoro
  misc_feature (1)..(19): ribonucleotide modified as described
  misc_feature (21)..(21): 3'-3 attached terminal deoxyabasic moiety
gggaggucucguagaccgutt

SEQ ID NO: 1680 - DNA, 21 bp, Artificial Sequence
  Description of Artificial Sequence: synthetic
  misc_feature (1)..(1): 2'-O-methyl
  misc_feature (2)..(4): 2'-deoxy-2'-fluoro
  misc_feature (5)..(5): 2'-O-methyl
  misc_feature (6)..(6): 2'-deoxy-2'-fluoro
  misc_feature (7)..(10): 2'-O-methyl
  misc_feature (10)..(16): 2'-deoxy-2'-fluoro
  misc_feature (17)..(19): 2'-O-methyl
  misc_feature (1)..(19): ribonucleotide modified as described
  misc_feature (20)..(21): internucleotide phosphorothioate linkage
gucuacgagaccucccgggtt

SEQ ID NO: 1681 - DNA, 21 bp, Artificial Sequence
  Description of Artificial Sequence: synthetic
  misc_feature (1)..(2): 2'-O-methyl
  misc_feature (3)..(5): 2'-deoxy-2'-fluoro
  misc_feature (6)..(6): 2'-O-methyl
  misc_feature (7)..(7): 2'-deoxy-2'-fluoro
  misc_feature (8)..(11): 2'-O-methyl
  misc_feature (12)..(17): 2'-deoxy-2'-fluoro
  misc_feature (18)..(19): 2'-O-methyl
  misc_feature (1)..(19): ribonucleotide modified as described
  misc_feature (20)..(21): internucleotide phosphorothioate linkage
ggucuacgagaccucccggtt

SEQ ID NO: 1682 - DNA, 21 bp, Artificial Sequence
  Description of Artificial Sequence: synthetic
  misc_feature (1)..(1): 2'-deoxy-2'-fluoro
  misc_feature (2)..(3): 2'-O-methyl
  misc_feature (4)..(6): 2'-deoxy-2'-fluoro
  misc_feature (7)..(7): 2'-O-methyl
  misc_feature (8)..(8): 2'-deoxy-2'-fluoro
  misc_feature (9)..(12): 2'-O-methyl
  misc_feature (13)..(18): 2'-deoxy-2'-fluoro
  misc_feature (19)..(19): 2'-O-methyl
  misc_feature (1)..(19): ribonucleotide modified as described
  misc_feature (20)..(21): internucleotide phosphorothioate linkage
cggucuacgagaccucccgtt

SEQ ID NO: 1683 - DNA, 21 bp, Artificial Sequence
  Description of Artificial Sequence: synthetic
  misc_feature (1)..(1): 2'-O-methyl
  misc_feature (2)..(2): 2'-deoxy-2'-fluoro
  misc_feature (3)..(4): 2'-O-methyl
  misc_feature (5)..(7): 2'-deoxy-2'-fluoro
  misc_feature (8)..(8): 2'-O-methyl
  misc_feature (9)..(9): 2'-deoxy-2'-fluoro
  misc_feature (10)..(13): 2'-O-methyl
  misc_feature (14)..(19): 2'-deoxy-2'-fluoro
  misc_feature (1)..(19): ribonucleotide modified as described
  misc_feature (20)..(21): internucleotide phosphorothioate linkage
acggucuacgagaccuccctt

SEQ ID NO: 1684 - DNA, 21 bp, Artificial Sequence
  Description of Artificial Sequence: synthetic
  misc_feature (1)..(1): 5'-3 attached terminal deoxyabasic moiety
  misc_feature (1)..(1): 2'-deoxy-2'-fluoro
  misc_feature (2)..(4): 2'-deoxy
  misc_feature (5)..(5): 2'-deoxy-2'-fluoro
  misc_feature (6)..(6): 2'-deoxy
  misc_feature (7)..(10): 2'-deoxy-2'-fluoro
  misc_feature (11)..(16): 2'-deoxy
  misc_feature (17)..(19): 2'-deoxy-2'-fluoro
  misc_feature (1)..(19): ribonucleotide modified as described
  misc_feature (21)..(21): 3'-3 attached terminal deoxyabasic moiety
cagaugcucuggagggccctt

SEQ ID NO: 1685 - DNA, 21 bp, Artificial Sequence
  Description of Artificial Sequence: synthetic
  misc_feature (1)..(1): 5'-3 attached terminal deoxyabasic moiety
  misc_feature (1)..(2): 2'-deoxy-2'-fluoro
  misc_feature (3)..(5): 2'-deoxy
  misc_feature (6)..(6): 2'-deoxy-2'-fluoro
  misc_feature (7)..(7): 2'-deoxy
  misc_feature (8)..(11): 2'-deoxy-2'-fluoro
  misc_feature (12)..(17): 2'-deoxy
  misc_feature (18)..(19): 2'-deoxy-2'-fluoro
  misc_feature (1)..(19): ribonucleotide modified as described
  misc_feature (21)..(21): 3'-3 attached terminal deoxyabasic moiety
ccagaugcucuggagggcctt

SEQ ID NO: 1686 - DNA, 21 bp, Artificial Sequence
  Description of Artificial Sequence: synthetic
  misc_feature (1)..(1): 5'-3 attached terminal deoxyabasic moiety
  misc_feature (1)..(1): 2'-deoxy
  misc_feature (2)..(3): 2'-deoxy-2'-fluoro
  misc_feature (4)..(6): 2'-deoxy
  misc_feature (7)..(7): 2'-deoxy-2'-fluoro
  misc_feature (8)..(8): 2'-deoxy
  misc_feature (9)..(12): 2'-deoxy-2'-fluoro
  misc_feature (13)..(18): 2'-deoxy
  misc_feature (19)..(19): 2'-deoxy-2'-fluoro
  misc_feature (1)..(19): ribonucleotide modified as described
  misc_feature (21)..(21): 3'-3 attached terminal deoxyabasic moiety
gccagaugcucuggagggctt

SEQ ID NO: 1687 - DNA, 21 bp, Artificial Sequence
  Description of Artificial Sequence: synthetic
  misc_feature (1)..(1): 5'-3 attached terminal deoxyabasic moiety
  misc_feature (1)..(1): 2'-deoxy-2'-fluoro
  misc_feature (2)..(2): 2'-deoxy
  misc_feature (3)..(4): 2'-deoxy-2'-fluoro
  misc_feature (5)..(7): 2'-deoxy
  misc_feature (8)..(8): 2'-deoxy-2'-fluoro
  misc_feature (9)..(9): 2'-deoxy
  misc_feature (10)..(13): 2'-deoxy-2'-fluoro
  misc_feature (14)..(19): 2'-deoxy
  misc_feature (1)..(19): ribonucleotide modified as described
  misc_feature (21)..(21): 3'-3 attached terminal deoxyabasic moiety
ugccagaugcucuggagggtt

SEQ ID NO: 1688 - DNA, 21 bp, Artificial Sequence
  Description of Artificial Sequence: synthetic
  misc_feature (1)..(3): 2'-O-methyl
  misc_feature (4)..(9): 2'-deoxy-2'-fluoro
  misc_feature (10)..(13): 2'-O-methyl
  misc_feature (14)..(14): 2'-deoxy-2'-fluoro
  misc_feature (15)..(15): 2'-O-methyl
  misc_feature (16)..(18): 2'-deoxy-2'-fluoro
  misc_feature (19)..(19): 2'-O-methyl
  misc_feature (1)..(19): ribonucleotide modified as described
  misc_feature (20)..(21): internucleotide phosphorothioate linkage
gggcccuccagagcaucugtt

SEQ ID NO: 1689 - DNA, 21 bp, Artificial Sequence
  Description of Artificial Sequence: synthetic
  misc_feature (1)..(2): 2'-O-methyl
  misc_feature (3)..(8): 2'-deoxy-2'-fluoro
  misc_feature (9)..(12): 2'-O-methyl
  misc_feature (13)..(13): 2'-deoxy-2'-fluoro
  misc_feature (14)..(14): 2'-O-methyl
  misc_feature (15)..(17): 2'-deoxy-2'-fluoro
  misc_feature (18)..(19): 2'-O-methyl
  misc_feature (1)..(19): ribonucleotide modified as described
  misc_feature (20)..(21): internucleotide phosphorothioate linkage
ggcccuccagagcaucuggtt

SEQ ID NO: 1690 - DNA, 21 bp, Artificial Sequence
  Description of Artificial Sequence: synthetic
  misc_feature (1)..(1): 2'-O-methyl
  misc_feature (2)..(7): 2'-deoxy-2'-fluoro
  misc_feature (8)..(11): 2'-O-methyl
  misc_feature (12)..(12): 2'-deoxy-2'-fluoro
  misc_feature (13)..(13): 2'-O-methyl
  misc_feature (14)..(16): 2'-deoxy-2'-fluoro
  misc_feature (17)..(18): 2'-O-methyl
  misc_feature (19)..(19): 2'-deoxy-2'-fluoro
  misc_feature (1)..(19): ribonucleotide modified as described
  misc_feature (20)..(21): internucleotide phosphorothioate linkage
gcccuccagagcaucuggctt

SEQ ID NO: 1691 - DNA, 21 bp, Artificial Sequence
  Description of Artificial Sequence: synthetic
  misc_feature (1)..(6): 2'-deoxy-2'-fluoro
  misc_feature (7)..(10): 2'-O-methyl
  misc_feature (11)..(11): 2'-deoxy-2'-fluoro
  misc_feature (12)..(12): 2'-O-methyl
  misc_feature (13)..(15): 2'-deoxy-2'-fluoro
  misc_feature (16)..(17): 2'-O-methyl
  misc_feature (18)..(18): 2'-deoxy-2'-fluoro
  misc_feature (19)..(19): 2'-O-methyl
  misc_feature (1)..(19): ribonucleotide modified as described
  misc_feature (20)..(21): internucleotide phosphorothioate linkage
cccuccagagcaucuggcatt

SEQ ID NO: 1692 - DNA, 21 bp, Artificial Sequence
  Description of Artificial Sequence: synthetic
  misc_feature (1)..(3): 2'-deoxy-2'-fluoro
  misc_feature (4)..(4): 2'-O-methyl
  misc_feature (5)..(5): 2'-deoxy-2'-fluoro
  misc_feature (6)..(7): 2'-O-methyl
  misc_feature (8)..(8): 2'-deoxy-2'-fluoro
  misc_feature (9)..(9): 2'-O-methyl
  misc_feature (10)..(11): 2'-deoxy-2'-fluoro
  misc_feature (12)..(12): 2'-O-methyl
  misc_feature (13)..(15): 2'-deoxy-2'-fluoro
  misc_feature (16)..(17): 2'-O-methyl
  misc_feature (18)..(18): 2'-deoxy-2'-fluoro
  misc_feature (19)..(19): 2'-O-methyl
  misc_feature (1)..(19): ribonucleotide modified as described
  misc_feature (20)..(21): internucleotide phosphorothioate linkage
cuugugguacugccugauatt

SEQ ID NO: 1693 - DNA, 21 bp, Artificial Sequence
  Description of Artificial Sequence: synthetic
  misc_feature (1)..(1): 2'-deoxy-2'-fluoro
  misc_feature (2)..(3): 2'-O-methyl
  misc_feature (4)..(4): 2'-deoxy-2'-fluoro
  misc_feature (5)..(5): 2'-O-methyl
  misc_feature (6)..(7): 2'-deoxy-2'-fluoro
  misc_feature (8)..(8): 2'-O-methyl
  misc_feature (9)..(11): 2'-deoxy-2'-fluoro
  misc_feature (12)..(13): 2'-O-methyl
  misc_feature (14)..(14): 2'-deoxy-2'-fluoro
  misc_feature (15)..(18): 2'-O-methyl
  misc_feature (19)..(19): 2'-deoxy-2'-fluoro
  misc_feature (1)..(19): ribonucleotide modified as described
  misc_feature (20)..(21): internucleotide phosphorothioate linkage
ugguacugccugauagggutt

SEQ ID NO: 1694 - DNA, 21 bp, Artificial Sequence
  Description of Artificial Sequence: synthetic
  misc_feature (1)..(4): 2'-deoxy-2'-fluoro
  misc_feature (5)..(10): 2'-O-methyl
  misc_feature (11)..(14): 2'-deoxy-2'-fluoro
  misc_feature (15)..(15): 2'-O-methyl
  misc_feature (16)..(16): 2'-deoxy-2'-fluoro
  misc_feature (17)..(19): 2'-O-methyl
  misc_feature (1)..(19): ribonucleotide modified as described
  misc_feature (20)..(21): internucleotide phosphorothioate linkage
ccccgggaggucucguagatt

SEQ ID NO: 1695 - DNA, 21 bp, Artificial Sequence
  Description of Artificial Sequence: synthetic
  misc_feature (1)..(1): 2'-O-methyl
  misc_feature (2)..(2): 2'-deoxy-2'-fluoro
  misc_feature (3)..(4): 2'-O-methyl
  misc_feature (5)..(7): 2'-deoxy-2'-fluoro
  misc_feature (8)..(8): 2'-O-methyl
  misc_feature (9)..(10): 2'-deoxy-2'-fluoro
  misc_feature (11)..(11): 2'-O-methyl
  misc_feature (12)..(12): 2'-deoxy-2'-fluoro
  misc_feature (13)..(14): 2'-O-methyl
  misc_feature (15)..(15): 2'-deoxy-2'-fluoro
  misc_feature (16)..(16): 2'-O-methyl
  misc_feature (17)..(19): 2'-deoxy-2'-fluoro
  misc_feature (1)..(19): ribonucleotide modified as described
  misc_feature (20)..(21): internucleotide phosphorothioate linkage
auaguccgucaugguguuctt

SEQ ID NO: 1696 - DNA, 21 bp, Artificial Sequence
  Description of Artificial Sequence: synthetic
  misc_feature (1)..(1): 2'-deoxy-2'-fluoro
  misc_feature (2)..(5): 2'-O-methyl
  misc_feature (6)..(6): 2'-deoxy-2'-fluoro
  misc_feature (7)..(8): 2'-O-methyl
  misc_feature (9)..(11): 2'-deoxy-2'-fluoro
  misc_feature (12)..(12): 2'-O-methyl
  misc_feature (13)..(14): 2'-deoxy-2'-fluoro
  misc_feature (15)..(15): 2'-O-methyl
  misc_feature (16)..(16): 2'-deoxy-2'-fluoro
  misc_feature (17)..(18): 2'-O-methyl
  misc_feature (1)..(19): ribonucleotide modified as described
  misc_feature (19)..(19): 2'-deoxy-2'-fluoro
  misc_feature (20)..(21): internucleotide phosphorothioate linkage
ugggauaguccgucauggutt

SEQ ID NO: 1697 - DNA, 21 bp, Artificial Sequence
  Description of Artificial Sequence: synthetic
  misc_feature (1)..(3): 2'-O-methyl
  misc_feature (4)..(4): 2'-deoxy-2'-fluoro
  misc_feature (5)..(5): 2'-O-methyl
  misc_feature (6)..(9): 2'-deoxy-2'-fluoro
  misc_feature (10)..(15): 2'-O-methyl
  misc_feature (16)..(19): 2'-deoxy-2'-fluoro
  misc_feature (1)..(19): ribonucleotide modified as described
  misc_feature (20)..(21): internucleotide phosphorothioate linkage
agaugcucuggagggcccctt

SEQ ID NO: 1698 - DNA, 21 bp, Artificial Sequence
  Description of Artificial Sequence: synthetic
  misc_feature (1)..(2): 2'-deoxy-2'-fluoro
  misc_feature (3)..(8): 2'-O-methyl
  misc_feature (9)..(12): 2'-deoxy-2'-fluoro
  misc_feature (13)..(13): 2'-O-methyl
  misc_feature (14)..(14): 2'-deoxy-2'-fluoro
  misc_feature (15)..(17): 2'-O-methyl
  misc_feature (18)..(19): 2'-deoxy-2'-fluoro
  misc_feature (1)..(19): ribonucleotide modified as described
  misc_feature (20)..(21): internucleotide phosphorothioate linkage
ccgggaggucucguagacctt

SEQ ID NO: 1699 - DNA, 21 bp, Artificial Sequence
  Description of Artificial Sequence: synthetic
  misc_feature (1)..(2): 2'-deoxy-2'-fluoro
  misc_feature (3)..(5): 2'-O-methyl
  misc_feature (6)..(6): 2'-deoxy-2'-fluoro
  misc_feature (7)..(7): 2'-O-methyl
  misc_feature (8)..(11): 2'-deoxy-2'-fluoro
  misc_feature (12)..(17): 2'-O-methyl
  misc_feature (18)..(19): 2'-deoxy-2'-fluoro
  misc_feature (1)..(19): ribonucleotide modified as described
  misc_feature (20)..(21): internucleotide phosphorothioate linkage
ccagaugcucuggagggcctt

SEQ ID NO: 1700 - DNA, 21 bp, Artificial Sequence
  Description of Artificial Sequence: synthetic
  misc_feature (1)..(1): 2'-deoxy-2'-fluoro
  misc_feature (2)..(7): 2'-O-methyl
  misc_feature (8)..(11): 2'-deoxy-2'-fluoro
  misc_feature (12)..(12): 2'-O-methyl
  misc_feature (13)..(13): 2'-deoxy-2'-fluoro
  misc_feature (14)..(16): 2'-O-methyl
  misc_feature (17)..(18): 2'-deoxy-2'-fluoro
  misc_feature (19)..(19): 2'-O-methyl
  misc_feature (1)..(19): ribonucleotide modified as described
  misc_feature (20)..(21): internucleotide phosphorothioate linkage
cgggaggucucguagaccgtt

SEQ ID NO: 1701 - DNA, 21 bp, Artificial Sequence
  Description of Artificial Sequence: synthetic
  misc_feature (1)..(1): 2'-O-methyl
  misc_feature (2)..(3): 2'-deoxy-2'-fluoro
  misc_feature (4)..(6): 2'-O-methyl
  misc_feature (7)..(7): 2'-deoxy-2'-fluoro
  misc_feature (8)..(8): 2'-O-methyl
  misc_feature (9)..(12): 2'-deoxy-2'-fluoro
  misc_feature (13)..(18): 2'-O-methyl
  misc_feature (19)..(19): 2'-deoxy-2'-fluoro
  misc_feature (1)..(19): ribonucleotide modified as described
  misc_feature (20)..(21): internucleotide phosphorothioate linkage
gccagaugcucuggagggctt

SEQ ID NO: 1702 - DNA, 21 bp, Artificial Sequence
  Description of Artificial Sequence: synthetic
  misc_feature (1)..(1): 5'-3 attached terminal deoxyabasic moiety
  misc_feature (1)..(2): 2'-deoxy-2'-fluoro
  misc_feature (3)..(8): 2'-O-methyl
  misc_feature (9)..(12): 2'-deoxy-2'-fluoro
  misc_feature (13)..(13): 2'-O-methyl
  misc_feature (14)..(14): 2'-deoxy-2'-fluoro
  misc_feature (15)..(17): 2'-O-methyl
  misc_feature (18)..(19): 2'-deoxy-2'-fluoro
  misc_feature (1)..(19): ribonucleotide modified as described
  misc_feature (20)..(21): internucleotide phosphorothioate linkage
ccgggaggucucguagacctt

SEQ ID NO: 1703 - DNA, 21 bp, Artificial Sequence
  Description of Artificial Sequence: synthetic
  misc_feature (1)..(2): 2'-deoxy-2'-fluoro
  misc_feature (3)..(8): 2'-O-methyl
  misc_feature (9)..(12): 2'-deoxy-2'-fluoro
  misc_feature (13)..(13): 2'-O-methyl
  misc_feature (14)..(14): 2'-deoxy-2'-fluoro
  misc_feature (15)..(17): 2'-O-methyl
  misc_feature (18)..(19): 2'-deoxy-2'-fluoro
  misc_feature (1)..(19): ribonucleotide modified as described
  misc_feature (20)..(21): internucleotide phosphorothioate linkage
  misc_feature (21)..(21): 3'-3 attached terminal deoxyabasic moiety
ccgggaggucucguagacctt

SEQ ID NO: 1704 - DNA, 21 bp, Artificial Sequence
  Description of Artificial Sequence: synthetic
  misc_feature (1)..(1): 5'-3 attached terminal deoxyabasic moiety
  misc_feature (1)..(2): 2'-deoxy-2'-fluoro
  misc_feature (3)..(8): 2'-O-methyl
  misc_feature (9)..(12): 2'-deoxy-2'-fluoro
  misc_feature (13)..(13): 2'-O-methyl
  misc_feature (14)..(14): 2'-deoxy-2'-fluoro
  misc_feature (15)..(17): 2'-O-methyl
  misc_feature (18)..(19): 2'-deoxy-2'-fluoro
  misc_feature (1)..(19): ribonucleotide modified as described
  misc_feature (20)..(21): internucleotide phosphorothioate linkage
  misc_feature (21)..(21): 3'-3 attached terminal deoxyabasic moiety
ccgggaggucucguagacctt

SEQ ID NO: 1705 - DNA, 34 bp, Artificial Sequence
  Description of Artificial Sequence: siNA 3'-classI
  misc_feature (1)..(32): ribonucleotide modified as described
ucucguagaccuuggucuacgagaccucccggtt

SEQ ID NO: 1706 - DNA, 32 bp, Artificial Sequence
  Description of Artificial Sequence: siNA 3'-classI
  misc_feature (1)..(30): ribonucleotide modified as described
ucguagaccuuggucuacgagaccucccggtt

SEQ ID NO: 1707 - DNA, 30 bp, Artificial Sequence
  Description of Artificial Sequence: siNA 3'-classI
  misc_feature (1)..(28): ribonucleotide modified as described
guagaccuuggucuacgagaccucccggtt

SEQ ID NO: 1708 - DNA, 28 bp, Artificial Sequence
  Description of Artificial Sequence: siNA 3'-classI
  misc_feature (1)..(26): n is thymidine
agaccuuggucuacgagaccucccggtt

SEQ ID NO: 1709 - RNA, 32 nt, Artificial Sequence
  Description of Artificial Sequence: siNA 5'-classI
ggucuacgagaccucccgguuccgggaggucu

SEQ ID NO: 1710 - RNA, 30 nt, Artificial Sequence
  Description of Artificial Sequence: siNA 5'-classI
ggucuacgagaccucccgguuccgggaggu

SEQ ID NO: 1711 - RNA, 28 nt, Artificial Sequence
  Description of Artificial Sequence: siNA 5'-classI
ggucuacgagaccucccgguuccgggag

SEQ ID NO: 1712 - RNA, 26 nt, Artificial Sequence
  Description of Artificial Sequence: siNA 5'-classI
ggucuacgagaccucccgguuccggg

SEQ ID NO: 1713 - DNA, 35 bp, Artificial Sequence
  Description of Artificial Sequence: siNA 3'-classI
  misc_feature (1)..(33): ribonucleotide modified as described
cucguagaccgaaaggucuacgagaccucccggtt

SEQ ID NO: 1714 - DNA, 33 bp, Artificial Sequence
  Description of Artificial Sequence: siNA 3'-gaaa
  misc_feature (1)..(31): ribonucleotide modified as described
cguagaccgaaaggucuacgagaccucccggtt

SEQ ID NO: 1715 - DNA, 31 bp, Artificial Sequence
  Description of Artificial Sequence: siNA 3'-gaaa
  misc_feature (1)..(29): ribonucleotide modified as described
uagaccgaaaggucuacgagaccucccggtt

SEQ ID NO: 1716 - DNA, 29 bp, Artificial Sequence
  Description of Artificial Sequence: siNA 3'-gaaa
  misc_feature (1)..(27): n is thymidine
gaccgaaaggucuacgagaccucccggtt

SEQ ID NO: 1717 - RNA, 35 nt, Artificial Sequence
  Description of Artificial Sequence: siNA 5'-gaaa
ggucuacgagaccucccgguugaaaccgggagguc

SEQ ID NO: 1718 - RNA, 33 nt, Artificial Sequence
  Description of Artificial Sequence: siNA 5'-gaaa
ggucuacgagaccucccgguugaaaccgggagg

SEQ ID NO: 1719 - RNA, 31 nt, Artificial Sequence
  Description of Artificial Sequence: siNA 5'-gaaa
ggucuacgagaccucccgguugaaaccggga

SEQ ID NO: 1720 - RNA, 29 nt, Artificial Sequence
  Description of Artificial Sequence: siNA 5'-gaaa
ggucuacgagaccucccgguugaaaccgg

SEQ ID NO: 1721 - DNA, 40 bp, Artificial Sequence
  Description of Artificial Sequence: siNA 3'-uuuguguag
  misc_feature (1)..(38): ribonucleotide modified as described
cguagaccuuuuuguguagggucuacgagaccucccggtt

SEQ ID NO: 1722 - DNA, 38 bp, Artificial Sequence
  Description of Artificial Sequence: siNA 3'-uuuguguag
  misc_feature (1)..(36): ribonucleotide modified as described
uagaccuuuuuguguagggucuacgagaccucccggtt

SEQ ID NO: 1723 - DNA, 36 bp, Artificial Sequence
  Description of Artificial Sequence: siNA 3'-uuuguguag
  misc_feature (1)..(34): n is thymidine
gaccuuuuuguguagggucuacgagaccucccggtt

SEQ ID NO: 1724 - DNA, 34 bp, Artificial Sequence
  Description of Artificial Sequence: siNA 3'-uuuguguag
  misc_feature (1)..(32): ribonucleotide modified as described
ccuuuuuguguagggucuacgagaccucccggtt

SEQ ID NO: 1725 - RNA, 40 nt, Artificial Sequence
  Description of Artificial Sequence: siNA 5'-uuuguguag
ggucuacgagaccucccgguuuuuguguagccgggagguc

SEQ ID NO: 1726 - RNA, 38 nt, Artificial Sequence
  Description of Artificial Sequence: siNA 5'-uuuguguag
ggucuacgagaccucccgguuuuuguguagccgggagg

SEQ ID NO: 1727 - RNA, 36 nt, Artificial Sequence
  Description of Artificial Sequence: siNA 5'-uuuguguag
ggucuacgagaccucccgguuuuuguguagccggga

SEQ ID NO: 1728 - RNA, 34 nt, Artificial Sequence
  Description of Artificial Sequence: siNA 5'-uuuguguag
ggucuacgagaccucccgguuuuuguguagccgg

SEQ ID NO: 1729 - DNA, 21 bp, Artificial Sequence
  Description of Artificial Sequence: synthetic
  misc_feature (3)..(5): 2'-deoxy-2'-fluoro
  misc_feature (7)..(7): 2'-deoxy-2'-fluoro
  misc_feature (12)..(17): 2'-deoxy-2'-fluoro
  misc_feature (1)..(19): ribonucleotide modified as described
  misc_feature (20)..(21): internucleotide phosphorothioate linkage
ggucuacgagaccucccggtt

SEQ ID NO: 1730 - DNA, 21 bp, Artificial Sequence
  Description of Artificial Sequence: synthetic
  misc_feature (1)..(1): terminal phosphate group
  misc_feature (3)..(5): 2'-deoxy-2'-fluoro
  misc_feature (7)..(7): 2'-deoxy-2'-fluoro
  misc_feature (12)..(17): 2'-deoxy-2'-fluoro
  misc_feature (1)..(19): ribonucleotide modified as described
  misc_feature (20)..(21): internucleotide phosphorothioate linkage
ggucuacgagaccucccggtt

SEQ ID NO: 1731 - DNA, 21 bp, Artificial Sequence
  Description of Artificial Sequence: synthetic
  misc_feature (1)..(1): terminal phosphorothioate linkage
  misc_feature (3)..(5): 2'-deoxy-2'-fluoro
  misc_feature (7)..(7): 2'-deoxy-2'-fluoro
  misc_feature (12)..(17): 2'-deoxy-2'-fluoro
  misc_feature (1)..(19): ribonucleotide modified as described
  misc_feature (20)..(21): internucleotide phosphorothioate linkage
ggucuacgagaccucccggtt

SEQ ID NO: 1732 - DNA, 21 bp, Artificial Sequence
  Description of Artificial Sequence: synthetic
  misc_feature (1)..(19): ribonucleotide modified as described
ggucuacgagaccucccggtt

SEQ ID NO: 1733 - DNA, 21 bp, Artificial Sequence
  Description of Artificial Sequence: synthetic
  misc_feature (1)..(1): terminal phosphate group
  misc_feature (1)..(19): ribonucleotide modified as described
ggucuacgagaccucccggtt

SEQ ID NO: 1734 - DNA, 21 bp, Artificial Sequence
  Description of Artificial Sequence: synthetic
  misc_feature (1)..(1): terminal phosphorothioate group
  misc_feature (1)..(19): ribonucleotide modified as described
ggucuacgagaccucccggtt

SEQ ID NO: 1735 - DNA, 23 bp, Artificial Sequence
  Description of Artificial Sequence: synthetic
  misc_feature (1)..(1): terminal phosphate group
  misc_feature (1)..(21): ribonucleotide modified as described
ggucuacgagaccucccggggtt

SEQ ID NO: 1736 - RNA, 27 nt, Artificial Sequence
  Description of Artificial Sequence: synthetic
  misc_feature (1)..(1): terminal phosphate group
  misc_feature (27)..(27): 3'-3 attached terminal deoxyabasic moiety
  misc_feature (27)..(27): 2'-deoxy-2'-fluoro
ggucuacgagaccucccggucucguau

SEQ ID NO: 1737 - RNA, 31 nt, Artificial Sequence
  Description of Artificial Sequence: synthetic
  misc_feature (1)..(1): terminal phosphate group
  misc_feature (30)..(31): 2'-deoxy-2'-fluoro
  misc_feature (31)..(31): 3'-3 attached terminal deoxyabasic moiety
ggucuacgagaccucccggaggucucguauu

SEQ ID NO: 1738 - DNA, 30 bp, Artificial Sequence
  Description of Artificial Sequence: synthetic
  misc_feature (1)..(1): terminal phosphate group
  misc_feature (1)..(20): ribonucleotide modified as described
  misc_feature (23)..(30): ribonucleotide modified as described
  misc_feature (30)..(30): 3'-3 attached terminal deoxyabasic moiety
  misc_feature (30)..(30): 2'-deoxy-2'-fluoro
mggucuacgagaccucccggttucucguau

SEQ ID NO: 1739 - DNA, 32 bp, Artificial Sequence
  Description of Artificial Sequence: synthetic
  misc_feature (1)..(1): terminal phosphate group
  misc_feature (1)..(19): ribonucleotide modified as described
  misc_feature (22)..(32): ribonucleotide modified as described
  misc_feature (32)..(32): 3'-3 attached terminal deoxyabasic moiety
  misc_feature (32)..(32): 2'-deoxy-2'-fluoro
ggucuacgagaccucccggttaggucucguau

SEQ ID NO: 1740 - DNA, 21 bp, Artificial Sequence
  Description of Artificial Sequence: synthetic
  misc_feature (1)..(1): 5'-3 attached terminal deoxyabasic moiety
  misc_feature (1)..(2): 2'-deoxy-2'-fluoro
  misc_feature (9)..(12): 2'-deoxy-2'-fluoro
  misc_feature (14)..(14): 2'-deoxy-2'-fluoro
  misc_feature (18)..(19): 2'-deoxy-2'-fluoro
  misc_feature (1)..(19): ribonucleotide modified as described
  misc_feature (21)..(21): 3'-3 attached terminal deoxyabasic moiety
ccgggaggucucguagacctt

SEQ ID NO: 1741 - DNA, 21 bp, Artificial Sequence
  Description of Artificial Sequence: synthetic
  misc_feature (1)..(1): 5'-3 attached terminal deoxyabasic moiety
  misc_feature (1)..(19): ribonucleotide modified as described
  misc_feature (21)..(21): 3'-3 attached terminal deoxyabasic moiety
ccccgggaggucucguagatt

SEQ ID NO: 1742 - DNA, 21 bp, Artificial Sequence
  Description of Artificial Sequence: synthetic
  misc_feature (1)..(1): 5'-3 attached terminal deoxyabasic moiety
  misc_feature (1)..(19): ribonucleotide modified as described
  misc_feature (21)..(21): 5'-3 attached terminal deoxyabasic moiety
cccgggaggucucguagactt

SEQ ID NO: 1743 - DNA, 21 bp, Artificial Sequence
  Description of Artificial Sequence: synthetic
  misc_feature (1)..(1): 5'-3 attached terminal deoxyabasic moiety
  misc_feature (1)..(19): ribonucleotide modified as described
  misc_feature (21)..(21): 3'-3 attached terminal deoxyabasic moiety
ccgggaggucucguagacctt

SEQ ID NO: 1744 - DNA, 21 bp, Artificial Sequence
  Description of Artificial Sequence: synthetic
  misc_feature (1)..(1): 5'-3 attached terminal deoxyabasic moiety
  misc_feature (1)..(19): ribonucleotide modified as described
  misc_feature (21)..(21): 3'-3 attached terminal deoxyabasic moiety
cgggaggucucguagaccgtt

SEQ ID NO: 1745 - DNA, 21 bp, Artificial Sequence
  Description of Artificial Sequence: synthetic
  misc_feature (1)..(1): 5'-3 attached terminal deoxyabasic moiety
  misc_feature (1)..(19): ribonucleotide modified as described
  misc_feature (21)..(21): 3'-3 attached terminal deoxyabasic moiety
gggaggucucguagaccgutt

SEQ ID NO: 1746 - DNA, 21 bp, Artificial Sequence
  Description of Artificial Sequence: synthetic
  misc_feature (1)..(19): ribonucleotide modified as described
  misc_feature (20)..(21): internucleotide phosphorothioate linkage
ucuacgagaccucccggggtt

SEQ ID NO: 1747 - DNA, 21 bp, Artificial Sequence
  Description of Artificial Sequence: synthetic
  misc_feature (1)..(19): ribonucleotide modified as described
  misc_feature (20)..(21): internucleotide phosphorothioate linkage
gucuacgagaccucccgggtt

SEQ ID NO: 1748 - DNA, 21 bp, Artificial Sequence
  Description of Artificial Sequence: synthetic
  misc_feature (1)..(19): ribonucleotide modified as described
  misc_feature (20)..(21): internucleotide phosphorothioate linkage
ggucuacgagaccucccggtt

SEQ ID NO: 1749 - DNA, 21 bp, Artificial Sequence
  Description of Artificial Sequence: synthetic
  misc_feature (1)..(19): ribonucleotide modified as described
  misc_feature (20)..(21): internucleotide phosphorothioate linkage
cggucuacgagaccucccgtt

SEQ ID NO: 1750 - DNA, 21 bp, Artificial Sequence
  Description of Artificial Sequence: synthetic
  misc_feature (1)..(19): ribonucleotide modified as described
  misc_feature (20)..(21): internucleotide phosphorothioate linkage
acggucuacgagaccuccctt

SEQ ID NO: 1751 - DNA, 21 bp, Artificial Sequence
  Description of Artificial Sequence: synthetic
  misc_feature (1)..(1): 5'-3 attached terminal deoxyabasic moiety
  misc_feature (1)..(2): 2'-deoxy-2'-fluoro
  misc_feature (6)..(6): 2'-deoxy-2'-fluoro
  misc_feature (8)..(11): 2'-deoxy-2'-fluoro
  misc_feature (18)..(19): 2'-deoxy-2'-fluoro
  misc_feature (1)..(19): ribonucleotide modified as described
  misc_feature (21)..(21): 3'-3 attached terminal deoxyabasic moiety
ccagaugcucuggagggcctt

SEQ ID NO: 1752 - DNA, 21 bp, Artificial Sequence
  Description of Artificial Sequence: synthetic
  misc_feature (3)..(8): 2'-deoxy-2'-fluoro
  misc_feature (13)..(13): 2'-deoxy-2'-fluoro
  misc_feature (15)..(17): 2'-deoxy-2'-fluoro
  misc_feature (1)..(19): ribonucleotide modified as described
  misc_feature (20)..(21): internucleotide phosphorothioate linkage
ggcccuccagagcaucuggtt

SEQ ID NO: 1753 - DNA, 21 bp, Artificial Sequence
  Description of Artificial Sequence: synthetic
  misc_feature (1)..(1): 5'-3 attached terminal deoxyabasic moiety
  misc_feature (1)..(19): ribonucleotide modified as described
  misc_feature (21)..(21): 3'-3 attached terminal deoxyabasic moiety
agaugcucuggagggcccctt

SEQ ID NO: 1754 - DNA, 21 bp, Artificial Sequence
  Description of Artificial Sequence: synthetic
  misc_feature (1)..(1): 5'-3 attached terminal deoxyabasic moiety
  misc_feature (1)..(19): ribonucleotide modified as described
  misc_feature (21)..(21): 3'-3 attached terminal deoxyabasic moiety
cagaugcucuggagggccctt

SEQ ID NO: 1755 - DNA, 21 bp, Artificial Sequence
  Description of Artificial Sequence: synthetic
  misc_feature (1)..(1): 5'-3 attached terminal deoxyabasic moiety
  misc_feature (1)..(19): ribonucleotide modified as described
  misc_feature (21)..(21): 3'-3 attached terminal deoxyabasic moiety
ccagaugcucuggagggcctt

SEQ ID NO: 1756 - DNA, 21 bp, Artificial Sequence
  Description of Artificial Sequence: synthetic
  misc_feature (1)..(1): 5'-3 attached terminal deoxyabasic moiety
  misc_feature (1)..(19): ribonucleotide modified as described
  misc_feature (21)..(21): 3'-3 attached terminal deoxyabasic moiety
gccagaugcucuggagggctt

SEQ ID NO: 1757 - DNA, 21 bp, Artificial Sequence
  Description of Artificial Sequence: synthetic
  misc_feature (1)..(1): 5'-3 attached terminal deoxyabasic moiety
  misc_feature (1)..(19): ribonucleotide modified as described
  misc_feature (21)..(21): 3'-3 attached terminal deoxyabasic moiety
ugccagaugcucuggagggtt

SEQ ID NO: 1758 - DNA, 21 bp, Artificial Sequence
  Description of Artificial Sequence: synthetic
  misc_feature (1)..(19): ribonucleotide modified as described
  misc_feature (20)..(21): internucleotide phosphorothioate linkage
ggggcccuccagagcaucutt

SEQ ID NO: 1759 - DNA, 21 bp, Artificial Sequence
  Description of Artificial Sequence: synthetic
  misc_feature (1)..(19): ribonucleotide modified as described
  misc_feature (20)..(21): internucleotide phosphorothioate linkage
gggcccuccagagcaucugtt

SEQ ID NO: 1760 - DNA, 21 bp, Artificial Sequence
  Description of Artificial Sequence: synthetic
  misc_feature (1)..(19): ribonucleotide modified as described
  misc_feature (20)..(21): internucleotide phosphorothioate linkage
ggcccuccagagcaucuggtt

SEQ ID NO: 1761 - DNA, 21 bp, Artificial Sequence
  Description of Artificial Sequence: synthetic
  misc_feature (1)..(19): ribonucleotide modified as described
  misc_feature (20)..(21): internucleotide phosphorothioate linkage
gcccuccagagcaucuggctt

SEQ ID NO: 1762 - DNA, 21 bp, Artificial Sequence
  Description of Artificial Sequence: synthetic
  misc_feature (1)..(19): ribonucleotide modified as described
  misc_feature (20)..(21): internucleotide phosphorothioate linkage
cccuccagagcaucuggcatt

SEQ ID NO: 1763 - RNA, 31 nt, Artificial Sequence
  Description of Artificial Sequence: synthetic
  misc_feature (1)..(1): terminal phosphate group
  misc_feature (31)..(31): 3'-3 attached terminal deoxyabasic moiety
acccuaucaggcaguaccaguacugccugau

SEQ ID NO: 1764 - RNA, 31 nt, Artificial Sequence
  Description of Artificial Sequence: synthetic
  misc_feature (1)..(1): terminal phosphate group
  misc_feature (31)..(31): 3'-3 attached terminal deoxyabasic moiety
acccuaucaggcaguaccgguacugccugau

SEQ ID NO: 1765 - RNA, 31 nt, Artificial Sequence
  Description of Artificial Sequence: synthetic
  misc_feature (1)..(1): terminal phosphate group
  misc_feature (31)..(31): 3'-3 attached terminal deoxyabasic moiety
ggucuacgagaccucccggaggucucguaga

SEQ ID NO: 1766 - RNA, 28 nt, Artificial Sequence
  Description of Artificial Sequence: synthetic
  misc_feature (1)..(1): terminal phosphate group
  misc_feature (28)..(28): 3'-3 attached terminal deoxyabasic moiety
ggucuacgagaccuccggaggucucgua

SEQ ID NO: 1767 - DNA, 21 bp, Artificial Sequence
  Description of Artificial Sequence: synthetic
  misc_feature (1)..(1): 2'-deoxy-2'-fluoro
  misc_feature (2)..(2): 2'-O-methyl
  misc_feature (3)..(4): 2'-deoxy-2'-fluoro
  misc_feature (5)..(5): 2'-O-methyl
  misc_feature (6)..(6): 2'-deoxy-2'-fluoro
  misc_feature (7)..(7): 2'-O-methyl
  misc_feature (8)..(14): 2'-deoxy-2'-fluoro
  misc_feature (15)..(15): 2'-O-methyl
  misc_feature (16)..(17): 2'-deoxy-2'-fluoro
  misc_feature (18)..(18): 2'-O-methyl
  misc_feature (19)..(19): 2'-deoxy-2'-fluoro
  misc_feature (1)..(19): ribonucleotide modified as described
  misc_feature (20)..(21): internucleotide phosphorothioate linkage
uaucaggcaguaccacaagtt

SEQ ID NO: 1768 - DNA, 21 bp, Artificial Sequence
  Description of Artificial Sequence: synthetic
  misc_feature (1)..(15): 2'-deoxy-2'-fluoro
  misc_feature (16)..(16): 2'-O-methyl
  misc_feature (17)..(19): 2'-deoxy-2'-fluoro
  misc_feature (1)..(19): ribonucleotide modified as described
  misc_feature (20)..(21): internucleotide phosphorothioate linkage
acccuaucaggcaguaccatt

SEQ ID NO: 1769 - DNA, 21 bp, Artificial Sequence
  Description of Artificial Sequence: synthetic
  misc_feature (1)..(6): 2'-deoxy-2'-fluoro
  misc_feature (7)..(7): 2'-O-methyl
  misc_feature (8)..(13): 2'-deoxy-2'-fluoro
  misc_feature (14)..(14): 2'-O-methyl
  misc_feature (15)..(19): 2'-deoxy-2'-fluoro
  misc_feature (1)..(19): ribonucleotide modified as described
  misc_feature (20)..(21): internucleotide phosphorothioate linkage
ucgcaagcacccuaucaggtt

SEQ ID NO: 1770 - DNA, 21 bp, Artificial Sequence
  Description of Artificial Sequence: synthetic
  misc_feature (1)..(7): 2'-deoxy-2'-fluoro
  misc_feature (8)..(8): 2'-O-methyl
  misc_feature (9)..(19): 2'-deoxy-2'-fluoro
  misc_feature (1)..(19): ribonucleotide modified as described
  misc_feature (20)..(21): internucleotide phosphorothioate linkage
cacucgcaagcacccuauctt

SEQ ID NO: 1771 - DNA, 21 bp, Artificial Sequence
  Description of Artificial Sequence: synthetic
  misc_feature (1)..(1): 2'-deoxy-2'-fluoro
  misc_feature (2)..(2): 2'-O-methyl
  misc_feature (3)..(7): 2'-deoxy-2'-fluoro
  misc_feature (8)..(8): 2'-O-methyl
  misc_feature (9)..(19): 2'-deoxy-2'-fluoro
  misc_feature (1)..(19): ribonucleotide modified as described
  misc_feature (20)..(21): internucleotide phosphorothioate linkage
cacucgcaagcacccuauctt

SEQ ID NO: 1772 - DNA, 21 bp, Artificial Sequence
  Description of Artificial Sequence: synthetic
  misc_feature (1)..(1): 5'-3 attached terminal deoxyabasic moiety
  misc_feature (1)..(2): 2'-deoxy-2'-fluoro
  misc_feature (3)..(9): 2'-deoxy
  misc_feature (10)..(11): 2'-deoxy-2'-fluoro
  misc_feature (12)..(12): 2'-deoxy
  misc_feature (13)..(13): 2'-deoxy-2'-fluoro
  misc_feature (14)..(15): 2'-deoxy
  misc_feature (16)..(16): 2'-deoxy-2'-fluoro
  misc_feature (17)..(18): 2'-deoxy
  misc_feature (19)..(19): 2'-deoxy-2'-fluoro
  misc_feature (1)..(19): ribonucleotide modified as described
  misc_feature (21)..(21): 3'-3 attached terminal deoxyabasic moiety
ccgggagagccauaguggutt

SEQ ID NO: 1773 - DNA, 21 bp, Artificial Sequence
  Description of Artificial Sequence: synthetic
  misc_feature (1)..(1): 5'-3 attached terminal deoxyabasic moiety
  misc_feature (1)..(1): 2'-deoxy-2'-fluoro
  misc_feature (2)..(8): 2'-deoxy
  misc_feature (9)..(10): 2'-deoxy-2'-fluoro
  misc_feature (11)..(11): 2'-deoxy
  misc_feature (12)..(12): 2'-deoxy-2'-fluoro
  misc_feature (13)..(14): 2'-deoxy
  misc_feature (15)..(15): 2'-deoxy-2'-fluoro
  misc_feature (16)..(17): 2'-deoxy
  misc_feature (18)..(19): 2'-deoxy-2'-fluoro
  misc_feature (1)..(19): ribonucleotide modified as described
  misc_feature (21)..(21): 3'-3 attached terminal deoxyabasic moiety
cgggagagccauagugguctt

SEQ ID NO: 1774 - DNA, 21 bp, Artificial Sequence
  Description of Artificial Sequence: synthetic
  misc_feature (1)..(1): 5'-3 attached terminal deoxyabasic moiety
  misc_feature (1)..(7): 2'-deoxy
  misc_feature (8)..(9): 2'-deoxy-2'-fluoro
  misc_feature (10)..(10): 2'-deoxy
  misc_feature (11)..(11): 2'-deoxy-2'-fluoro
  misc_feature (12)..(13): 2'-deoxy
  misc_feature (14)..(14): 2'-deoxy-2'-fluoro
  misc_feature (15)..(16): 2'-deoxy
  misc_feature (17)..(19): 2'-deoxy-2'-fluoro
  misc_feature (1)..(19): ribonucleotide modified as described
  misc_feature (21)..(21): 3'-3 attached terminal deoxyabasic moiety
gggagagccauaguggucutt

SEQ ID NO: 1775 - DNA, 21 bp, Artificial Sequence
  Description of Artificial Sequence: synthetic
  misc_feature (1)..(1): 5'-3 attached terminal deoxyabasic moiety
  misc_feature (1)..(1): 2'-deoxy
  misc_feature (2)..(2): 2'-deoxy-2'-fluoro
  misc_feature (3)..(4): 2'-deoxy
  misc_feature (5)..(7): 2'-deoxy-2'-fluoro
  misc_feature (8)..(8): 2'-deoxy
  misc_feature (9)..(9): 2'-deoxy-2'-fluoro
  misc_feature (10)..(13): 2'-deoxy
  misc_feature (14)..(15): 2'-deoxy-2'-fluoro
  misc_feature (16)..(17): 2'-deoxy
  misc_feature (18)..(18): 2'-deoxy-2'-fluoro
  misc_feature (19)..(19): 2'-deoxy
  misc_feature (1)..(19): ribonucleotide modified as described
  misc_feature (21)..(21): 3'-3 attached terminal deoxyabasic moiety
guggucugcggaaccggugtt

SEQ ID NO: 1776 - DNA, 21 bp, Artificial Sequence
  Description of Artificial Sequence: synthetic
  misc_feature (1)..(1): 5'-3 attached terminal deoxyabasic moiety
  misc_feature (1)..(1): 2'-deoxy-2'-fluoro
  misc_feature (2)..(3): 2'-deoxy
  misc_feature (4)..(6): 2'-deoxy-2'-fluoro
  misc_feature (7)..(7): 2'-deoxy
  misc_feature (8)..(8): 2'-deoxy-2'-fluoro
  misc_feature (9)..(12): 2'-deoxy
  misc_feature (13)..(14): 2'-deoxy-2'-fluoro
  misc_feature (15)..(16): 2'-deoxy
  misc_feature (17)..(17): 2'-deoxy-2'-fluoro
  misc_feature (18)..(19): 2'-deoxy
  misc_feature (1)..(19): ribonucleotide modified as described
  misc_feature (21)..(21): 3'-3 attached terminal deoxyabasic moiety
uggucugcggaaccggugatt

SEQ ID NO: 1777 - DNA, 21 bp, Artificial Sequence
  Description of Artificial Sequence: synthetic
  misc_feature (1)..(1): 5'-3 attached terminal deoxyabasic moiety
  misc_feature (1)..(2): 2'-deoxy
  misc_feature (3)..(5): 2'-deoxy-2'-fluoro
  misc_feature (6)..(6): 2'-deoxy
  misc_feature (7)..(7): 2'-deoxy-2'-fluoro
  misc_feature (8)..(11): 2'-deoxy
  misc_feature (12)..(13): 2'-deoxy-2'-fluoro
  misc_feature (14)..(15): 2'-deoxy
  misc_feature (16)..(16): 2'-deoxy-2'-fluoro
  misc_feature (17)..(19): 2'-deoxy
  misc_feature (1)..(19): ribonucleotide modified as described
  misc_feature (21)..(21): 3'-3 attached terminal deoxyabasic moiety
ggucugcggaaccggugagtt

SEQ ID NO: 1778 - DNA, 21 bp, Artificial Sequence
  Description of Artificial Sequence: synthetic
  misc_feature (1)..(1): 5'-3 attached terminal deoxyabasic moiety
  misc_feature (1)..(1): 2'-deoxy
  misc_feature (2)..(4): 2'-deoxy-2'-fluoro
  misc_feature (5)..(5): 2'-deoxy
  misc_feature (6)..(6): 2'-deoxy-2'-fluoro
  misc_feature (7)..(10): 2'-deoxy
  misc_feature (11)..(12): 2'-deoxy-2'-fluoro
  misc_feature (13)..(14): 2'-deoxy
  misc_feature (15)..(15): 2'-deoxy-2'-fluoro
  misc_feature (16)..(18): 2'-deoxy
  misc_feature (19)..(19): 2'-deoxy-2'-fluoro
  misc_feature (1)..(19): ribonucleotide modified as described
  misc_feature (21)..(21): 3'-3 attached terminal deoxyabasic moiety
gucugcggaaccggugagutt

SEQ ID NO: 1779 - DNA, 21 bp, Artificial Sequence
  Description of Artificial Sequence: synthetic
  misc_feature (1)..(1): 5'-3 attached terminal deoxyabasic moiety
  misc_feature (1)..(3): 2'-deoxy-2'-fluoro
  misc_feature (4)..(4): 2'-deoxy
  misc_feature (5)..(5): 2'-deoxy-2'-fluoro
  misc_feature (6)..(9): 2'-deoxy
  misc_feature (10)..(11): 2'-deoxy-2'-fluoro
  misc_feature (12)..(13): 2'-deoxy
  misc_feature (14)..(14): 2'-deoxy-2'-fluoro
  misc_feature (15)..(17): 2'-deoxy
  misc_feature (18)..(18): 2'-deoxy-2'-fluoro
  misc_feature (19)..(19): 2'-deoxy
  misc_feature (1)..(19): ribonucleotide modified as described
  misc_feature (21)..(21): 3'-3 attached terminal deoxyabasic moiety
ucugcggaaccggugaguatt

SEQ ID NO: 1780 - DNA, 21 bp, Artificial Sequence
  Description of Artificial Sequence: synthetic
  misc_feature (1)..(1): 5'-3 attached terminal deoxyabasic moiety
  misc_feature (1)..(1): 2'-deoxy-2'-fluoro
  misc_feature (2)..(2): 2'-deoxy
  misc_feature (3)..(3): 2'-deoxy-2'-fluoro
  misc_feature (4)..(7): 2'-deoxy
  misc_feature (8)..(9): 2'-deoxy-2'-fluoro
  misc_feature (10)..(11): 2'-deoxy
  misc_feature (12)..(12): 2'-deoxy-2'-fluoro
  misc_feature (13)..(15): 2'-deoxy
  misc_feature (16)..(16): 2'-deoxy-2'-fluoro
  misc_feature (17)..(17): 2'-deoxy
  misc_feature (18)..(18): 2'-deoxy-2'-fluoro
  misc_feature (19)..(19): 2'-deoxy
  misc_feature (1)..(19): ribonucleotide modified as described
  misc_feature (21)..(21): 3'-3 attached terminal deoxyabasic moiety
ugcggaaccggugaguacatt

SEQ ID NO: 1781 - DNA, 21 bp, Artificial Sequence
  Description of Artificial Sequence: synthetic
  misc_feature (1)..(1): 5'-3 attached terminal deoxyabasic moiety
  misc_feature (1)..(1): 2'-deoxy
  misc_feature (2)..(2): 2'-deoxy-2'-fluoro
  misc_feature (3)..(6): 2'-deoxy
  misc_feature (7)..(8): 2'-deoxy-2'-fluoro
  misc_feature (9)..(10): 2'-deoxy
  misc_feature (11)..(11): 2'-deoxy-2'-fluoro
  misc_feature (12)..(14): 2'-deoxy
  misc_feature (15)..(15): 2'-deoxy-2'-fluoro
  misc_feature (16)..(16): 2'-deoxy
  misc_feature (17)..(17): 2'-deoxy-2'-fluoro
  misc_feature (18)..(18): 2'-deoxy
  misc_feature (19)..(19): 2'-deoxy-2'-fluoro
  misc_feature (1)..(19): ribonucleotide modified as described
  misc_feature (21)..(21): 3'-3 attached terminal deoxyabasic moiety
gcggaaccggugaguacactt

SEQ ID NO: 1782 - DNA, 21 bp, Artificial Sequence
  Description of Artificial Sequence: synthetic
  misc_feature (1)..(1): 5'-3 attached terminal deoxyabasic moiety
  misc_feature (1)..(3): 2'-deoxy
  misc_feature (4)..(5): 2'-deoxy-2'-fluoro
  misc_feature (6)..(7): 2'-deoxy
  misc_feature (8)..(8): 2'-deoxy-2'-fluoro
  misc_feature (9)..(11): 2'-deoxy
  misc_feature (12)..(12): 2'-deoxy-2'-fluoro
  misc_feature (13)..(13): 2'-deoxy
  misc_feature (14)..(14): 2'-deoxy-2'-fluoro
  misc_feature (15)..(15): 2'-deoxy
  misc_feature (16)..(17): 2'-deoxy-2'-fluoro
  misc_feature (18)..(19): 2'-deoxy
  misc_feature (1)..(19): ribonucleotide modified as described
  misc_feature (21)..(21): 3'-3 attached terminal deoxyabasic moiety
gaaccggugaguacaccggtt

SEQ ID NO: 1783 - DNA, 21 bp, Artificial Sequence
  Description of Artificial Sequence: synthetic
  misc_feature (1)..(1): 5'-3 attached terminal deoxyabasic moiety
  misc_feature (1)..(2): 2'-deoxy
  misc_feature (3)..(4): 2'-deoxy-2'-fluoro
  misc_feature (5)..(6): 2'-deoxy
  misc_feature (7)..(7): 2'-deoxy-2'-fluoro
  misc_feature (8)..(10): 2'-deoxy
  misc_feature (11)..(11): 2'-deoxy-2'-fluoro
  misc_feature (12)..(12): 2'-deoxy
  misc_feature (13)..(13): 2'-deoxy-2'-fluoro
  misc_feature (14)..(14): 2'-deoxy
  misc_feature (15)..(16): 2'-deoxy-2'-fluoro
  misc_feature (17)..(19): 2'-deoxy
  misc_feature (1)..(19): ribonucleotide modified as described
  misc_feature (21)..(21): 3'-3 attached terminal deoxyabasic moiety
aaccggugaguacaccggatt

SEQ ID NO: 1784 - DNA, 21 bp, Artificial Sequence
  Description of Artificial Sequence: synthetic
  misc_feature (1)..(1): 5'-3 attached terminal deoxyabasic moiety
  misc_feature (1)..(1): 2'-deoxy
  misc_feature (2)..(3): 2'-deoxy-2'-fluoro
  misc_feature (4)..(5): 2'-deoxy
  misc_feature (6)..(6): 2'-deoxy-2'-fluoro
  misc_feature (7)..(9): 2'-deoxy
  misc_feature (10)..(10): 2'-deoxy-2'-fluoro
  misc_feature (11)..(11): 2'-deoxy
  misc_feature (12)..(12): 2'-deoxy-2'-fluoro
  misc_feature (13)..(13): 2'-deoxy
  misc_feature (14)..(15): 2'-deoxy-2'-fluoro
  misc_feature (16)..(19): 2'-deoxy
  misc_feature (1)..(19): ribonucleotide modified as described
  misc_feature (21)..(21): 3'-3 attached terminal deoxyabasic moiety
accggugaguacaccggaatt

SEQ ID NO: 1785 - DNA, 21 bp, Artificial Sequence
  Description of Artificial Sequence: synthetic
  misc_feature (1)..(1): 5'-3 attached terminal deoxyabasic moiety
  misc_feature (1)..(2): 2'-deoxy-2'-fluoro
  misc_feature (3)..(4): 2'-deoxy
  misc_feature (5)..(5): 2'-deoxy-2'-fluoro
  misc_feature (6)..(8): 2'-deoxy
  misc_feature (9)..(9): 2'-deoxy-2'-fluoro
  misc_feature (10)..(10): 2'-deoxy
  misc_feature (11)..(11): 2'-deoxy-2'-fluoro
  misc_feature (12)..(12): 2'-deoxy
  misc_feature (13)..(14): 2'-deoxy-2'-fluoro
  misc_feature (15)..(18): 2'-deoxy
  misc_feature (19)..(19): 2'-deoxy-2'-fluoro
  misc_feature (1)..(19): ribonucleotide modified as described
  misc_feature (21)..(21): 3'-3 attached terminal deoxyabasic moiety
ccggugaguacaccggaautt

SEQ ID NO: 1786 - DNA, 21 bp, Artificial Sequence
  Description of Artificial Sequence: synthetic
  misc_feature (1)..(1): 5'-3 attached terminal deoxyabasic moiety
  misc_feature (1)..(1): 2'-deoxy
  misc_feature (2)..(2): 2'-deoxy-2'-fluoro
  misc_feature (3)..(8): 2'-deoxy
  misc_feature (9)..(12): 2'-deoxy-2'-fluoro
  misc_feature (13)..(13): 2'-deoxy
  misc_feature (14)..(14): 2'-deoxy-2'-fluoro
  misc_feature (15)..(16): 2'-deoxy
  misc_feature (17)..(17): 2'-deoxy-2'-fluoro
  misc_feature (18)..(18): 2'-deoxy
  misc_feature (19)..(19): 2'-deoxy-2'-fluoro
  misc_feature (1)..(19): ribonucleotide modified as described
  misc_feature (21)..(21): 3'-3 attached terminal deoxyabasic moiety
gcgaaaggccuugugguactt

SEQ ID NO: 1787 - DNA, 21 bp, Artificial Sequence
  Description of Artificial Sequence: synthetic
  misc_feature (1)..(1): 5'-3 attached terminal deoxyabasic moiety
  misc_feature (1)..(1): 2'-deoxy-2'-fluoro
  misc_feature (2)..(7): 2'-deoxy
  misc_feature (8)..(11): 2'-deoxy-2'-fluoro
  misc_feature (12)..(12): 2'-deoxy
  misc_feature (13)..(13): 2'-deoxy-2'-fluoro
  misc_feature (14)..(15): 2'-deoxy
  misc_feature (16)..(16): 2'-deoxy-2'-fluoro
  misc_feature (17)..(17): 2'-deoxy
  misc_feature (18)..(19): 2'-deoxy-2'-fluoro
  misc_feature (1)..(19): ribonucleotide modified as described
  misc_feature (21)..(21): 3'-3 attached terminal deoxyabasic moiety
cgaaaggccuugugguacutt

SEQ ID NO: 1788 - DNA, 21 bp, Artificial Sequence
  Description of Artificial Sequence: synthetic
  misc_feature (1)..(1): 5'-3 attached terminal deoxyabasic moiety
  misc_feature (1)..(6): 2'-deoxy
  misc_feature (7)..(10): 2'-deoxy-2'-fluoro
  misc_feature (11)..(11): 2'-deoxy
  misc_feature (12)..(12): 2'-deoxy-2'-fluoro
  misc_feature (13)..(14): 2'-deoxy
  misc_feature (15)..(15): 2'-deoxy-2'-fluoro
  misc_feature (16)..(16): 2'-deoxy
  misc_feature (17)..(18): 2'-deoxy-2'-fluoro
  misc_feature (19)..(19): 2'-deoxy
  misc_feature (1)..(19): ribonucleotide modified as described
  misc_feature (21)..(21): 3'-3 attached terminal deoxyabasic moiety
gaaaggccuugugguacugtt

SEQ ID NO: 1789 - DNA, 21 bp, Artificial Sequence
  Description of Artificial Sequence: synthetic
  misc_feature (1)..(1): 5'-3 attached terminal deoxyabasic moiety
  misc_feature (1)..(5): 2'-deoxy
  misc_feature (6)..(9): 2'-deoxy-2'-fluoro
  misc_feature (10)..(10): 2'-deoxy
  misc_feature (11)..(11): 2'-deoxy-2'-fluoro
  misc_feature (12)..(13): 2'-deoxy
  misc_feature (14)..(14): 2'-deoxy-2'-fluoro
  misc_feature (15)..(15): 2'-deoxy
  misc_feature (16)..(17): 2'-deoxy-2'-fluoro
  misc_feature (18)..(18): 2'-deoxy
  misc_feature (19)..(19): 2'-deoxy-2'-fluoro
  misc_feature (1)..(19): ribonucleotide modified as described
  misc_feature (21)..(21): 3'-3 attached terminal deoxyabasic moiety
aaaggccuugugguacugctt

SEQ ID NO: 1790 - DNA, 21 bp, Artificial Sequence
  Description of Artificial Sequence: synthetic
  misc_feature (1)..(1): 5'-3 attached terminal deoxyabasic moiety
  misc_feature (1)..(4): 2'-deoxy
  misc_feature (5)..(8): 2'-deoxy-2'-fluoro
  misc_feature (9)..(9): 2'-deoxy
  misc_feature (10)..(10): 2'-deoxy-2'-fluoro
  misc_feature (11)..(12): 2'-deoxy
  misc_feature (13)..(13): 2'-deoxy-2'-fluoro
  misc_feature (14)..(14): 2'-deoxy
  misc_feature (15)..(16): 2'-deoxy-2'-fluoro
  misc_feature (17)..(17): 2'-deoxy
  misc_feature (18)..(19): 2'-deoxy-2'-fluoro
  misc_feature (1)..(19): ribonucleotide modified as described
  misc_feature (21)..(21): 3'-3 attached terminal deoxyabasic moiety
aaggccuugugguacugcctt

SEQ ID NO: 1791 - DNA, 21 bp, Artificial Sequence
  Description of Artificial Sequence: synthetic
  misc_feature (1)..(1): 5'-3 attached terminal deoxyabasic moiety
  misc_feature (1)..(2): 2'-deoxy
  misc_feature (3)..(6): 2'-deoxy-2'-fluoro
  misc_feature (7)..(7): 2'-deoxy
  misc_feature (8)..(8): 2'-deoxy-2'-fluoro
  misc_feature (9)..(10): 2'-deoxy
  misc_feature (11)..(11): 2'-deoxy-2'-fluoro
  misc_feature (12)..(12): 2'-deoxy
  misc_feature (13)..(14): 2'-deoxy-2'-fluoro
  misc_feature (15)..(15): 2'-deoxy
  misc_feature (16)..(18): 2'-deoxy-2'-fluoro
  misc_feature (19)..(19): 2'-deoxy
  misc_feature (1)..(19): ribonucleotide modified as described
  misc_feature (21)..(21): 3'-3 attached terminal deoxyabasic moiety
ggccuugugguacugccugtt

SEQ ID NO: 1792 - DNA, 21 bp, Artificial Sequence
  Description of Artificial Sequence: synthetic
  misc_feature (1)..(1): 5'-3 attached terminal deoxyabasic moiety
  misc_feature (1)..(1): 2'-deoxy
  misc_feature (2)..(5): 2'-deoxy-2'-fluoro
  misc_feature (6)..(6): 2'-deoxy
  misc_feature (7)..(7): 2'-deoxy-2'-fluoro
  misc_feature (8)..(9): 2'-deoxy
  misc_feature (10)..(10): 2'-deoxy-2'-fluoro
  misc_feature (11)..(11): 2'-deoxy
  misc_feature (12)..(13): 2'-deoxy-2'-fluoro
  misc_feature (14)..(14): 2'-deoxy
  misc_feature (15)..(17): 2'-deoxy-2'-fluoro
  misc_feature (18)..(19): 2'-deoxy
  misc_feature (1)..(19): ribonucleotide modified as described
  misc_feature (21)..(21): 3'-3 attached terminal deoxyabasic moiety
gccuugugguacugccugatt

SEQ ID NO: 1793 - DNA, 21 bp, Artificial Sequence
  Description of Artificial Sequence: synthetic
  misc_feature (1)..(1): 5'-3 attached terminal deoxyabasic moiety
  misc_feature (1)..(4): 2'-deoxy-2'-fluoro
  misc_feature (5)..(5): 2'-deoxy
  misc_feature (6)..(6): 2'-deoxy-2'-fluoro
  misc_feature (7)..(8): 2'-deoxy
  misc_feature (9)..(9): 2'-deoxy-2'-fluoro
  misc_feature (10)..(10): 2'-deoxy
  misc_feature (11)..(12): 2'-deoxy-2'-fluoro
  misc_feature (13)..(13): 2'-deoxy
  misc_feature (14)..(16): 2'-deoxy-2'-fluoro
  misc_feature (17)..(18): 2'-deoxy
  misc_feature (19)..(19): 2'-deoxy-2'-fluoro
  misc_feature (1)..(19): ribonucleotide modified as described
  misc_feature (21)..(21): 3'-3 attached terminal deoxyabasic moiety
ccuugugguacugccugautt

SEQ ID NO: 1794 - DNA, 21 bp, Artificial Sequence
  Description of Artificial Sequence: synthetic
  misc_feature (1)..(1): 5'-3 attached terminal deoxyabasic moiety
  misc_feature (1)..(1): 2'-deoxy
  misc_feature (2)..(3): 2'-deoxy-2'-fluoro
  misc_feature (4)..(4): 2'-deoxy
  misc_feature (5)..(7): 2'-deoxy-2'-fluoro
  misc_feature (8)..(9): 2'-deoxy
  misc_feature (10)..(10): 2'-deoxy-2'-fluoro
  misc_feature (11)..(14): 2'-deoxy
  misc_feature (15)..(15): 2'-deoxy-2'-fluoro
  misc_feature (16)..(16): 2'-deoxy
  misc_feature (17)..(19): 2'-deoxy-2'-fluoro
  misc_feature (1)..(19): ribonucleotide modified as described
  misc_feature (21)..(21): 3'-3 attached terminal deoxyabasic moiety
acugccugauagggugcuutt

SEQ ID NO: 1795 - DNA, 21 bp, Artificial Sequence
  Description of Artificial Sequence: synthetic
  misc_feature (1)..(1): 5'-3 attached terminal deoxyabasic moiety
  misc_feature (1)..(1): 2'-deoxy
  misc_feature (2)..(4): 2'-deoxy-2'-fluoro
  misc_feature (5)..(6): 2'-deoxy
  misc_feature (7)..(7): 2'-deoxy-2'-fluoro
  misc_feature (8)..(11): 2'-deoxy
  misc_feature (12)..(12): 2'-deoxy-2'-fluoro
  misc_feature (13)..(13): 2'-deoxy
  misc_feature (14)..(16): 2'-deoxy-2'-fluoro
  misc_feature (17)..(17): 2'-deoxy
  misc_feature (18)..(18): 2'-deoxy-2'-fluoro
  misc_feature (19)..(19): 2'-deoxy
  misc_feature (1)..(19): ribonucleotide modified as described
  misc_feature (21)..(21): 3'-3 attached terminal deoxyabasic moiety
gccugauagggugcuugcgtt

SEQ ID NO: 1796 - DNA, 21 bp, Artificial Sequence
  Description of Artificial Sequence: synthetic
  misc_feature (1)..(1): 5'-3 attached terminal deoxyabasic moiety
  misc_feature (1)..(2): 2'-deoxy-2'-fluoro
  misc_feature (3)..(4): 2'-deoxy
  misc_feature (5)..(5): 2'-deoxy-2'-fluoro
  misc_feature (6)..(9): 2'-deoxy
  misc_feature (10)..(10): 2'-deoxy-2'-fluoro
  misc_feature (11)..(11): 2'-deoxy
  misc_feature (12)..(14): 2'-deoxy-2'-fluoro
  misc_feature (15)..(15): 2'-deoxy
  misc_feature (16)..(16): 2'-deoxy-2'-fluoro
  misc_feature (17)..(19): 2'-deoxy
  misc_feature (1)..(19): ribonucleotide modified as described
  misc_feature (21)..(21): 3'-3 attached terminal deoxyabasic moiety
cugauagggugcuugcgagtt

SEQ ID NO: 1797 - DNA, 21 bp, Artificial Sequence
  Description of Artificial Sequence: synthetic
  misc_feature (1)..(1): 5'-3 attached terminal deoxyabasic moiety
  misc_feature (1)..(1): 2'-deoxy-2'-fluoro
  misc_feature (2)..(3): 2'-deoxy
  misc_feature (4)..(4): 2'-deoxy-2'-fluoro
  misc_feature (5)..(8): 2'-deoxy
  misc_feature (9)..(9): 2'-deoxy-2'-fluoro
  misc_feature (10)..(10): 2'-deoxy
  misc_feature (11)..(13): 2'-deoxy-2'-fluoro
  misc_feature (14)..(14): 2'-deoxy
  misc_feature (15)..(15): 2'-deoxy-2'-fluoro
  misc_feature (16)..(18): 2'-deoxy
  misc_feature (19)..(19): 2'-deoxy-2'-fluoro
  misc_feature (1)..(19): ribonucleotide modified as described
  misc_feature (21)..(21): 3'-3 attached terminal deoxyabasic moiety
ugauagggugcuugcgagutt

SEQ ID NO: 1798 - DNA, 21 bp, Artificial Sequence
  Description of Artificial Sequence: synthetic
  misc_feature (1)..(1): 5'-3 attached terminal deoxyabasic moiety
  misc_feature (1)..(1): 2'-deoxy
  misc_feature (2)..(2): 2'-deoxy-2'-fluoro
  misc_feature (3)..(6): 2'-deoxy
  misc_feature (7)..(7): 2'-deoxy-2'-fluoro
  misc_feature (8)..(8): 2'-deoxy
  misc_feature (9)..(11): 2'-deoxy-2'-fluoro
  misc_feature (12)..(12): 2'-deoxy
  misc_feature (13)..(13): 2'-deoxy-2'-fluoro
  misc_feature (14)..(16): 2'-deoxy
  misc_feature (17)..(17): 2'-deoxy-2'-fluoro
  misc_feature (18)..(18): 2'-deoxy
  misc_feature (19)..(19): 2'-deoxy-2'-fluoro
  misc_feature (1)..(19): ribonucleotide modified as described
  misc_feature (21)..(21): 3'-3 attached terminal deoxyabasic moiety
auagggugcuugcgagugctt

SEQ ID NO: 1799 - DNA, 21 bp, Artificial Sequence
  Description of Artificial Sequence: synthetic
  misc_feature (1)..(1): 5'-3 attached terminal deoxyabasic moiety
  misc_feature (1)..(1): 2'-deoxy-2'-fluoro
  misc_feature (2)..(5): 2'-deoxy
  misc_feature (6)..(6): 2'-deoxy-2'-fluoro
  misc_feature (7)..(7): 2'-deoxy
  misc_feature (8)..(10): 2'-deoxy-2'-fluoro
  misc_feature (11)..(11): 2'-deoxy
  misc_feature (12)..(12): 2'-deoxy-2'-fluoro
  misc_feature (13)..(15): 2'-deoxy
  misc_feature (16)..(16): 2'-deoxy-2'-fluoro
  misc_feature (17)..(17): 2'-deoxy
  misc_feature (18)..(19): 2'-deoxy-2'-fluoro
  misc_feature (1)..(19): ribonucleotide modified as described
  misc_feature (21)..(21): 3'-3 attached terminal deoxyabasic moiety
uagggugcuugcgagugcctt

SEQ ID NO: 1800 - DNA, 21 bp, Artificial Sequence
  Description of Artificial Sequence: synthetic
  misc_feature (1)..(1): 5'-3 attached terminal deoxyabasic moiety
  misc_feature (1)..(3): 2'-deoxy
  misc_feature (4)..(4): 2'-deoxy-2'-fluoro
  misc_feature (5)..(5): 2'-deoxy
  misc_feature (6)..(8): 2'-deoxy-2'-fluoro
  misc_feature (9)..(9): 2'-deoxy
  misc_feature (10)..(10): 2'-deoxy-2'-fluoro
  misc_feature (11)..(13): 2'-deoxy
  misc_feature (14)..(14): 2'-deoxy-2'-fluoro
  misc_feature (15)..(15): 2'-deoxy
  misc_feature (16)..(19): 2'-deoxy-2'-fluoro
  misc_feature (1)..(19): ribonucleotide modified as described
  misc_feature (21)..(21): 3'-3 attached terminal deoxyabasic moiety
gggugcuugcgagugcccctt

SEQ ID NO: 1801 - DNA, 21 bp, Artificial Sequence
  Description of Artificial Sequence: synthetic
  misc_feature (1)..(1): 5'-3 attached terminal deoxyabasic moiety
  misc_feature (1)..(2): 2'-deoxy
  misc_feature (3)..(3): 2'-deoxy-2'-fluoro
  misc_feature (4)..(4): 2'-deoxy
  misc_feature (5)..(7): 2'-deoxy-2'-fluoro
  misc_feature (8)..(8): 2'-deoxy
  misc_feature (9)..(9): 2'-deoxy-2'-fluoro
  misc_feature (10)..(12): 2'-deoxy
  misc_feature (13)..(13): 2'-deoxy-2'-fluoro
  misc_feature (14)..(14): 2'-deoxy
  misc_feature (15)..(18): 2'-deoxy-2'-fluoro
  misc_feature (19)..(19): 2'-deoxy
  misc_feature (1)..(19): ribonucleotide modified as described
  misc_feature (21)..(21): 3'-3 attached terminal deoxyabasic moiety
ggugcuugcgagugccccgtt

SEQ ID NO: 1802 - DNA, 21 bp, Artificial Sequence
  Description of Artificial Sequence: synthetic
  misc_feature (1)..(1): 5'-3 attached terminal deoxyabasic moiety
  misc_feature (1)..(1): 2'-deoxy
  misc_feature (2)..(4): 2'-deoxy-2'-fluoro
  misc_feature (5)..(5): 2'-deoxy
  misc_feature (6)..(6): 2'-deoxy-2'-fluoro
  misc_feature (7)..(9): 2'-deoxy
  misc_feature (10)..(10): 2'-deoxy-2'-fluoro
  misc_feature (11)..(11): 2'-deoxy
  misc_feature (12)..(15): 2'-deoxy-2'-fluoro
  misc_feature (16)..(19): 2'-deoxy
  misc_feature (1)..(19): ribonucleotide modified as described
  misc_feature (21)..(21): 3'-3 attached terminal deoxyabasic moiety
gcuugcgagugccccgggatt

SEQ ID NO: 1803 - DNA, 21 bp, Artificial Sequence
  Description of Artificial Sequence: synthetic
  misc_feature (1)..(1): 5'-3 attached terminal deoxyabasic moiety
  misc_feature (1)..(3): 2'-deoxy
  misc_feature (4)..(4): 2'-deoxy-2'-fluoro
  misc_feature (5)..(5): 2'-deoxy
  misc_feature (6)..(8): 2'-deoxy-2'-fluoro
  misc_feature (9)..(9): 2'-deoxy
  misc_feature (10)..(10): 2'-deoxy-2'-fluoro
  misc_feature (11)..(14): 2'-deoxy
  misc_feature (15)..(19): 2'-deoxy-2'-fluoro
  misc_feature (1)..(19): ribonucleotide modified as described
  misc_feature (21)..(21): 3'-3 attached terminal deoxyabasic moiety
cuugcgagugccccgggagtt

SEQ ID NO: 1804 - DNA, 21 bp, Artificial Sequence
  Description of Artificial Sequence: synthetic
  misc_feature (1)..(1): 5'-3 attached terminal deoxyabasic moiety
  misc_feature (1)..(2): 2'-deoxy-2'-fluoro
  misc_feature (3)..(3): 2'-deoxy
  misc_feature (4)..(4): 2'-deoxy-2'-fluoro
  misc_feature (5)..(7): 2'-deoxy
  misc_feature (8)..(8): 2'-deoxy-2'-fluoro
  misc_feature (9)..(9): 2'-deoxy
  misc_feature (10)..(13): 2'-deoxy-2'-fluoro
  misc_feature (14)..(19): 2'-deoxy
  misc_feature (1)..(19): ribonucleotide modified as described
  misc_feature (21)..(21): 3'-3 attached terminal deoxyabasic moiety
uugcgagugccccgggaggtt

SEQ ID NO: 1805 - DNA, 21 bp, Artificial Sequence
  Description of Artificial Sequence: synthetic
  misc_feature (1)..(1): 5'-3 attached terminal deoxyabasic moiety
  misc_feature (1)..(1): 2'-deoxy-2'-fluoro
  misc_feature (2)..(2): 2'-deoxy
  misc_feature (3)..(3): 2'-deoxy-2'-fluoro
  misc_feature (4)..(6): 2'-deoxy
  misc_feature (7)..(7): 2'-deoxy-2'-fluoro
  misc_feature (8)..(8): 2'-deoxy
  misc_feature (9)..(12): 2'-deoxy-2'-fluoro
  misc_feature (13)..(18): 2'-deoxy
  misc_feature (19)..(19): 2'-deoxy-2'-fluoro
  misc_feature (1)..(19): ribonucleotide modified as described
  misc_feature (21)..(21): 3'-3 attached terminal deoxyabasic moiety
ugcgagugccccgggaggutt

SEQ ID NO: 1806 - DNA, 21 bp, Artificial Sequence
  Description of Artificial Sequence: synthetic
  misc_feature (1)..(1): 5'-3 attached terminal deoxyabasic moiety
  misc_feature (1)..(1): 2'-deoxy
  misc_feature (2)..(2): 2'-deoxy-2'-fluoro
  misc_feature (3)..(5): 2'-deoxy
  misc_feature (6)..(6): 2'-deoxy-2'-fluoro
  misc_feature (7)..(7): 2'-deoxy
  misc_feature (8)..(11): 2'-deoxy-2'-fluoro
  misc_feature (12)..(17): 2'-deoxy
  misc_feature (18)..(19): 2'-deoxy-2'-fluoro
  misc_feature (1)..(19): ribonucleotide modified as described
  misc_feature (21)..(21): 3'-3 attached terminal deoxyabasic moiety
gcgagugccccgggagguctt

SEQ ID NO: 1807 - DNA, 21 bp, Artificial Sequence
  Description of Artificial Sequence: synthetic
  misc_feature (1)..(1): 5'-3 attached terminal deoxyabasic moiety
  misc_feature (1)..(1): 2'-deoxy-2'-fluoro
  misc_feature (2)..(4): 2'-deoxy
  misc_feature (5)..(5): 2'-deoxy-2'-fluoro
  misc_feature (6)..(6): 2'-deoxy
  misc_feature (7)..(10): 2'-deoxy-2'-fluoro
  misc_feature (11)..(16): 2'-deoxy
  misc_feature (17)..(19): 2'-deoxy-2'-fluoro
  misc_feature (1)..(19): ribonucleotide modified as described
  misc_feature (21)..(21): 3'-3 attached terminal deoxyabasic moiety
cgagugccccgggaggucutt

SEQ ID NO: 1808 - DNA, 21 bp, Artificial Sequence
  Description of Artificial Sequence: synthetic
  misc_feature (1)..(1): 5'-3 attached terminal deoxyabasic moiety
  misc_feature (1)..(3): 2'-deoxy
  misc_feature (4)..(4): 2'-deoxy-2'-fluoro
  misc_feature (5)..(5): 2'-deoxy
  misc_feature (6)..(9): 2'-deoxy-2'-fluoro
  misc_feature (10)..(15): 2'-deoxy
  misc_feature (16)..(19): 2'-deoxy-2'-fluoro
  misc_feature (1)..(19): ribonucleotide modified as described
  misc_feature (21)..(21): 3'-3 attached terminal deoxyabasic moiety
gagugccccgggaggucuctt

SEQ ID NO: 1809 - DNA, 21 bp, Artificial Sequence
  Description of Artificial Sequence: synthetic
  misc_feature (1)..(1): 5'-3 attached terminal deoxyabasic moiety
  misc_feature (1)..(1): 2'-deoxy
  misc_feature (2)..(2): 2'-deoxy-2'-fluoro
  misc_feature (3)..(3): 2'-deoxy
  misc_feature (4)..(7): 2'-deoxy-2'-fluoro
  misc_feature (8)..(13): 2'-deoxy
  misc_feature (14)..(17): 2'-deoxy-2'-fluoro
  misc_feature (18)..(18): 2'-deoxy
  misc_feature (19)..(19): 2'-deoxy-2'-fluoro
  misc_feature (1)..(19): ribonucleotide modified as described
  misc_feature (21)..(21): 3'-3 attached terminal deoxyabasic moiety
gugccccgggaggucucgutt

SEQ ID NO: 1810 - DNA, 21 bp, Artificial Sequence
  Description of Artificial Sequence: synthetic
  misc_feature (1)..(1): 5'-3 attached terminal deoxyabasic moiety
  misc_feature (1)..(1): 2'-deoxy-2'-fluoro
  misc_feature (2)..(2): 2'-deoxy
  misc_feature (3)..(6): 2'-deoxy-2'-fluoro
  misc_feature (7)..(12): 2'-deoxy
  misc_feature (13)..(16): 2'-deoxy-2'-fluoro
  misc_feature (17)..(17): 2'-deoxy
  misc_feature (18)..(18): 2'-deoxy-2'-fluoro
  misc_feature (19)..(19): 2'-deoxy
  misc_feature (1)..(19): ribonucleotide modified as described
  misc_feature (21)..(21): 3'-3 attached terminal deoxyabasic moiety
ugccccgggaggucucguatt

SEQ ID NO: 1811 - DNA, 21 bp, Artificial Sequence
  Description of Artificial Sequence: synthetic
  misc_feature (1)..(1): 5'-3 attached terminal deoxyabasic moiety
  misc_feature (1)..(5): 2'-deoxy
  misc_feature (6)..(9): 2'-deoxy-2'-fluoro
  misc_feature (10)..(10): 2'-deoxy
  misc_feature (11)..(11): 2'-deoxy-2'-fluoro
  misc_feature (12)..(14): 2'-deoxy
  misc_feature (15)..(16): 2'-deoxy-2'-fluoro
  misc_feature (17)..(17): 2'-deoxy
  misc_feature (18)..(18): 2'-deoxy-2'-fluoro
  misc_feature (19)..(19): 2'-deoxy
  misc_feature (1)..(19): ribonucleotide modified as described
  misc_feature (21)..(21): 3'-3 attached terminal deoxyabasic moiety
ggaggucucguagaccgugtt

SEQ ID NO: 1812 - DNA, 21 bp, Artificial Sequence
  Description of Artificial Sequence: synthetic
  misc_feature (1)..(1): 2'-O-methyl
  misc_feature (2)..(3): 2'-deoxy-2'-fluoro
  misc_feature (4)..(4): 2'-O-methyl
  misc_feature (5)..(6): 2'-deoxy-2'-fluoro
  misc_feature (7)..(7): 2'-O-methyl
  misc_feature (8)..(8): 2'-deoxy-2'-fluoro
  misc_feature (9)..(10): 2'-O-methyl
  misc_feature (11)..(17): 2'-deoxy-2'-fluoro
  misc_feature (18)..(19): 2'-O-methyl
  misc_feature (1)..(19): ribonucleotide modified as described
  misc_feature (20)..(21): internucleotide phosphorothioate linkage
accacuauggcucucccggtt

SEQ ID NO: 1813 - DNA, 21 bp, Artificial Sequence
  Description of Artificial Sequence: synthetic
  misc_feature (1)..(2): 2'-O-methyl
  misc_feature (3)..(4): 2'-deoxy-2'-fluoro
  misc_feature (5)..(5): 2'-O-methyl
  misc_feature (6)..(7): 2'-deoxy-2'-fluoro
  misc_feature (8)..(8): 2'-O-methyl
  misc_feature (9)..(9): 2'-deoxy-2'-fluoro
  misc_feature (10)..(11): 2'-O-methyl
  misc_feature (12)..(18): 2'-deoxy-2'-fluoro
  misc_feature (19)..(19): 2'-O-methyl
  misc_feature (1)..(19): ribonucleotide modified as described
  misc_feature (20)..(21): internucleotide phosphorothioate linkage
gaccacuauggcucucccgtt

SEQ ID NO: 1814 - DNA, 21 bp, Artificial Sequence
  Description of Artificial Sequence: synthetic
  misc_feature (1)..(3): 2'-O-methyl
  misc_feature (4)..(5): 2'-deoxy-2'-fluoro
  misc_feature (6)..(6): 2'-O-methyl
  misc_feature (7)..(8): 2'-deoxy-2'-fluoro
  misc_feature (9)..(9): 2'-O-methyl
  misc_feature (10)..(10): 2'-deoxy-2'-fluoro
  misc_feature (11)..(12): 2'-O-methyl
  misc_feature (13)..(19): 2'-deoxy-2'-fluoro
  misc_feature (1)..(19): ribonucleotide modified as described
  misc_feature (20)..(21): internucleotide phosphorothioate linkage
agaccacuauggcucuccctt

SEQ ID NO: 1815 - DNA, 21 bp, Artificial Sequence
  Description of Artificial Sequence: synthetic
  misc_feature (1)..(1): 2'-deoxy-2'-fluoro
  misc_feature (2)..(2): 2'-O-methyl
  misc_feature (3)..(4): 2'-deoxy-2'-fluoro
  misc_feature (5)..(6): 2'-O-methyl
  misc_feature (7)..(10): 2'-deoxy-2'-fluoro
  misc_feature (11)..(11): 2'-O-methyl
  misc_feature (12)..(12): 2'-deoxy-2'-fluoro
  misc_feature (13)..(15): 2'-O-methyl
  misc_feature (16)..(17): 2'-deoxy-2'-fluoro
  misc_feature (18)..(18): 2'-O-methyl
  misc_feature (19)..(19): 2'-deoxy-2'-fluoro
  misc_feature (1)..(19): ribonucleotide modified as described
  misc_feature (20)..(21): internucleotide phosphorothioate linkage
caccgguuccgcagaccactt

SEQ ID NO: 1816 - DNA, 21 bp, Artificial Sequence
  Description of Artificial Sequence: synthetic
  misc_feature (1)..(2): 2'-deoxy-2'-fluoro
  misc_feature (3)..(3): 2'-O-methyl
  misc_feature (4)..(5): 2'-deoxy-2'-fluoro
  misc_feature (6)..(7): 2'-O-methyl
  misc_feature (8)..(11): 2'-deoxy-2'-fluoro
  misc_feature (12)..(12): 2'-O-methyl
  misc_feature (13)..(13): 2'-deoxy-2'-fluoro
  misc_feature (14)..(16): 2'-O-methyl
  misc_feature (17)..(18): 2'-deoxy-2'-fluoro
  misc_feature (19)..(19): 2'-O-methyl
  misc_feature (1)..(19): ribonucleotide modified as described
  misc_feature (20)..(21): internucleotide phosphorothioate linkage
ucaccgguuccgcagaccatt

SEQ ID NO: 1817 - DNA, 21 bp, Artificial Sequence
  Description of Artificial Sequence: synthetic
  misc_feature (1)..(3): 2'-deoxy-2'-fluoro
  misc_feature (4)..(4): 2'-O-methyl
  misc_feature (5)..(6): 2'-deoxy-2'-fluoro
  misc_feature (7)..(8): 2'-O-methyl
  misc_feature (9)..(12): 2'-deoxy-2'-fluoro
  misc_feature (13)..(13): 2'-O-methyl
  misc_feature (14)..(14): 2'-deoxy-2'-fluoro
  misc_feature (15)..(17): 2'-O-methyl
  misc_feature (18)..(19): 2'-deoxy-2'-fluoro
  misc_feature (1)..(19): ribonucleotide modified as described
  misc_feature (20)..(21): internucleotide phosphorothioate linkage
cucaccgguuccgcagacctt

SEQ ID NO: 1818 - DNA, 21 bp, Artificial Sequence
  Description of Artificial Sequence: synthetic
  misc_feature (1)..(1): 2'-O-methyl
  misc_feature (2)..(4): 2'-deoxy-2'-fluoro
  misc_feature (5)..(5): 2'-O-methyl
  misc_feature (6)..(7): 2'-deoxy-2'-fluoro
  misc_feature (8)..(9): 2'-O-methyl
  misc_feature (10)..(13): 2'-deoxy-2'-fluoro
  misc_feature (14)..(14): 2'-O-methyl
  misc_feature (15)..(15): 2'-deoxy-2'-fluoro
  misc_feature (16)..(18): 2'-O-methyl
  misc_feature (19)..(19): 2'-deoxy-2'-fluoro
  misc_feature (1)..(19): ribonucleotide modified as described
  misc_feature (20)..(21): internucleotide phosphorothioate linkage
acucaccgguuccgcagactt

SEQ ID NO: 1819 - DNA, 21 bp, Artificial Sequence
  Description of Artificial Sequence: synthetic
  misc_feature (1)..(1): 2'-deoxy-2'-fluoro
  misc_feature (2)..(2): 2'-O-methyl
  misc_feature (3)..(5): 2'-deoxy-2'-fluoro
  misc_feature (6)..(6): 2'-O-methyl
  misc_feature (7)..(8): 2'-deoxy-2'-fluoro
  misc_feature (9)..(10): 2'-O-methyl
  misc_feature (11)..(14): 2'-deoxy-2'-fluoro
  misc_feature (15)..(15): 2'-O-methyl
  misc_feature (16)..(16): 2'-deoxy-2'-fluoro
  misc_feature (17)..(19): 2'-O-methyl
  misc_feature (1)..(19): ribonucleotide modified as described
  misc_feature (20)..(21): internucleotide phosphorothioate linkage
uacucaccgguuccgcagatt

SEQ ID NO: 1820 - DNA, 21 bp, Artificial Sequence
  Description of Artificial Sequence: synthetic
  misc_feature (1)..(1): 2'-deoxy-2'-fluoro
  misc_feature (2)..(2): 2'-O-methyl
  misc_feature (3)..(3): 2'-deoxy-2'-fluoro
  misc_feature (4)..(4): 2'-O-methyl
  misc_feature (5)..(7): 2'-deoxy-2'-fluoro
  misc_feature (8)..(8): 2'-O-methyl
  misc_feature (9)..(10): 2'-deoxy-2'-fluoro
  misc_feature (11)..(12): 2'-O-methyl
  misc_feature (13)..(16): 2'-deoxy-2'-fluoro
  misc_feature (17)..(17): 2'-O-methyl
  misc_feature (18)..(18): 2'-deoxy-2'-fluoro
  misc_feature (19)..(19): 2'-O-methyl
  misc_feature (1)..(19): ribonucleotide modified as described
  misc_feature (20)..(21): internucleotide phosphorothioate linkage
uguacucaccgguuccgcatt

SEQ ID NO: 1821 - DNA, 21 bp, Artificial Sequence
  Description of Artificial Sequence: synthetic
  misc_feature (1)..(1): 2'-O-methyl
  misc_feature (2)..(2): 2'-deoxy-2'-fluoro
  misc_feature (3)..(3): 2'-O-methyl
  misc_feature (4)..(4): 2'-deoxy-2'-fluoro
  misc_feature (5)..(5): 2'-O-methyl
  misc_feature (6)..(8): 2'-deoxy-2'-fluoro
  misc_feature (9)..(9): 2'-O-methyl
  misc_feature (10)..(11): 2'-deoxy-2'-fluoro
  misc_feature (12)..(13): 2'-O-methyl
  misc_feature (14)..(17): 2'-deoxy-2'-fluoro
  misc_feature (18)..(18): 2'-O-methyl
  misc_feature (19)..(19): 2'-deoxy-2'-fluoro
  misc_feature (1)..(19): ribonucleotide modified as described
  misc_feature (20)..(21): internucleotide phosphorothioate linkage
guguacucaccgguuccgctt

SEQ ID NO: 1822 - DNA, 21 bp, Artificial Sequence
  Description of Artificial Sequence: synthetic
  misc_feature (1)..(2): 2'-deoxy-2'-fluoro
  misc_feature (3)..(4): 2'-O-methyl
  misc_feature (5)..(5): 2'-deoxy-2'-fluoro
  misc_feature (6)..(6): 2'-O-methyl
  misc_feature (7)..(7): 2'-deoxy-2'-fluoro
  misc_feature (8)..(8): 2'-O-methyl
  misc_feature (9)..(11): 2'-deoxy-2'-fluoro
  misc_feature (12)..(12): 2'-O-methyl
  misc_feature (13)..(14): 2'-deoxy-2'-fluoro
  misc_feature (15)..(16): 2'-O-methyl
  misc_feature (17)..(19): 2'-deoxy-2'-fluoro
  misc_feature (1)..(19): ribonucleotide modified as described
  misc_feature (20)..(21): internucleotide phosphorothioate linkage
ccgguguacucaccgguuctt

SEQ ID NO: 1823 - DNA, 21 bp, Artificial Sequence
  Description of Artificial Sequence: synthetic
  misc_feature (1)..(3): 2'-deoxy-2'-fluoro
  misc_feature (4)..(5): 2'-O-methyl
  misc_feature (6)..(6): 2'-deoxy-2'-fluoro
  misc_feature (7)..(7): 2'-O-methyl
  misc_feature (8)..(8): 2'-deoxy-2'-fluoro
  misc_feature (9)..(9): 2'-O-methyl
  misc_feature (10)..(12): 2'-deoxy-2'-fluoro
  misc_feature (13)..(13): 2'-O-methyl
  misc_feature (14)..(15): 2'-deoxy-2'-fluoro
  misc_feature (16)..(17): 2'-O-methyl
  misc_feature (18)..(19): 2'-deoxy-2'-fluoro
  misc_feature (1)..(19): ribonucleotide modified as described
  misc_feature (20)..(21): internucleotide phosphorothioate linkage
uccgguguacucaccgguutt

SEQ ID NO: 1824 - DNA, 21 bp, Artificial Sequence
  Description of Artificial Sequence: synthetic
  misc_feature (1)..(4): 2'-deoxy-2'-fluoro
  misc_feature (5)..(6): 2'-O-methyl
  misc_feature (7)..(7): 2'-deoxy-2'-fluoro
  misc_feature (8)..(8): 2'-O-methyl
  misc_feature (9)..(9): 2'-deoxy-2'-fluoro
  misc_feature (10)..(10): 2'-O-methyl
  misc_feature (11)..(13): 2'-deoxy-2'-fluoro
  misc_feature (14)..(14): 2'-O-methyl
  misc_feature (15)..(16): 2'-deoxy-2'-fluoro
  misc_feature (17)..(18): 2'-O-methyl
  misc_feature (19)..(19): 2'-deoxy-2'-fluoro
  misc_feature (1)..(19): ribonucleotide modified as described
  misc_feature (20)..(21): internucleotide phosphorothioate linkage
uuccgguguacucaccggutt

SEQ ID NO: 1825 - DNA, 21 bp, Artificial Sequence
  Description of Artificial Sequence: synthetic
  misc_feature (1)..(1): 2'-O-methyl
  misc_feature (2)..(5): 2'-deoxy-2'-fluoro
  misc_feature (6)..(7): 2'-O-methyl
  misc_feature (8)..(8): 2'-deoxy-2'-fluoro
  misc_feature (9)..(9): 2'-O-methyl
  misc_feature (10)..(10): 2'-deoxy-2'-fluoro
  misc_feature (11)..(11): 2'-O-methyl
  misc_feature (12)..(14): 2'-deoxy-2'-fluoro
  misc_feature (15)..(15): 2'-O-methyl
  misc_feature (16)..(17): 2'-deoxy-2'-fluoro
  misc_feature (18)..(19): 2'-O-methyl
  misc_feature (1)..(19): ribonucleotide modified as described
  misc_feature (20)..(21): internucleotide phosphorothioate linkage
auuccgguguacucaccggtt

SEQ ID NO: 1826 - DNA, 21 bp, Artificial Sequence
  Description of Artificial Sequence: synthetic
  misc_feature (1)..(1): 2'-O-methyl
  misc_feature (2)..(2): 2'-deoxy-2'-fluoro
  misc_feature (3)..(3): 2'-O-methyl
  misc_feature (4)..(5): 2'-deoxy-2'-fluoro
  misc_feature (6)..(6): 2'-O-methyl
  misc_feature (7)..(7): 2'-deoxy-2'-fluoro
  misc_feature (8)..(11): 2'-O-methyl
  misc_feature (12)..(17): 2'-deoxy-2'-fluoro
  misc_feature (18)..(18): 2'-O-methyl
  misc_feature (19)..(19): 2'-deoxy-2'-fluoro
  misc_feature (1)..(19): ribonucleotide modified as described
  misc_feature (20)..(21): internucleotide phosphorothioate linkage
guaccacaaggccuuucgctt

SEQ ID NO: 1827 - DNA, 21 bp, Artificial Sequence
  Description of Artificial Sequence: synthetic
  misc_feature (1)..(2): 2'-O-methyl
  misc_feature (3)..(3): 2'-deoxy-2'-fluoro
  misc_feature (4)..(4): 2'-O-methyl
  misc_feature (5)..(6): 2'-deoxy-2'-fluoro
  misc_feature (7)..(7): 2'-O-methyl
  misc_feature (8)..(8): 2'-deoxy-2'-fluoro
  misc_feature (9)..(12): 2'-O-methyl
  misc_feature (13)..(18): 2'-deoxy-2'-fluoro
  misc_feature (19)..(19): 2'-O-methyl
  misc_feature (1)..(19): ribonucleotide modified as described
  misc_feature (20)..(21): internucleotide phosphorothioate linkage
aguaccacaaggccuuucgtt

SEQ ID NO: 1828 - DNA, 21 bp, Artificial Sequence
  Description of Artificial Sequence: synthetic
  misc_feature (1)..(1): 2'-deoxy-2'-fluoro
  misc_feature (2)..(3): 2'-O-methyl
  misc_feature (4)..(4): 2'-deoxy-2'-fluoro
  misc_feature (5)..(5): 2'-O-methyl
  misc_feature (6)..(7): 2'-deoxy-2'-fluoro
  misc_feature (8)..(8): 2'-O-methyl
  misc_feature (9)..(9): 2'-deoxy-2'-fluoro
  misc_feature (10)..(13): 2'-O-methyl
  misc_feature (14)..(19): 2'-deoxy-2'-fluoro
  misc_feature (1)..(19): ribonucleotide modified as described
  misc_feature (20)..(21): internucleotide phosphorothioate linkage
caguaccacaaggccuuuctt

SEQ ID NO: 1829 - DNA, 21 bp, Artificial Sequence
  Description of Artificial Sequence: synthetic
  misc_feature (1)..(1): 2'-O-methyl
  misc_feature (2)..(2): 2'-deoxy-2'-fluoro
  misc_feature (3)..(4): 2'-O-methyl
  misc_feature (5)..(5): 2'-deoxy-2'-fluoro
  misc_feature (6)..(6): 2'-O-methyl
  misc_feature (7)..(8): 2'-deoxy-2'-fluoro
  misc_feature (9)..(9): 2'-O-methyl
  misc_feature (10)..(10): 2'-deoxy-2'-fluoro
  misc_feature (11)..(14): 2'-O-methyl
  misc_feature (15)..(19): 2'-deoxy-2'-fluoro
  misc_feature (1)..(19): ribonucleotide modified as described
  misc_feature (20)..(21): internucleotide phosphorothioate linkage
gcaguaccacaaggccuuutt

SEQ ID NO: 1830 - DNA, 21 bp, Artificial Sequence
  Description of Artificial Sequence: synthetic
  misc_feature (1)..(2): 2'-O-methyl
  misc_feature (3)..(3): 2'-deoxy-2'-fluoro
  misc_feature (4)..(5): 2'-O-methyl
  misc_feature (6)..(6): 2'-deoxy-2'-fluoro
  misc_feature (7)..(7): 2'-O-methyl
  misc_feature (8)..(9): 2'-deoxy-2'-fluoro
  misc_feature (10)..(10): 2'-O-methyl
  misc_feature (11)..(11): 2'-deoxy-2'-fluoro
  misc_feature (12)..(15): 2'-O-methyl
  misc_feature (16)..(19): 2'-deoxy-2'-fluoro
  misc_feature (1)..(19): ribonucleotide modified as described
  misc_feature (20)..(21): internucleotide phosphorothioate linkage
ggcaguaccacaaggccuutt

SEQ ID NO: 1831 - DNA, 21 bp, Artificial Sequence
  Description of Artificial Sequence: synthetic
  misc_feature (1)..(1): 2'-deoxy-2'-fluoro
  misc_feature (2)..(4): 2'-O-methyl
  misc_feature (5)..(5): 2'-deoxy-2'-fluoro
  misc_feature (6)..(7): 2'-O-methyl
  misc_feature (8)..(8): 2'-deoxy-2'-fluoro
  misc_feature (9)..(9): 2'-O-methyl
  misc_feature (10)..(11): 2'-deoxy-2'-fluoro
  misc_feature (12)..(12): 2'-O-methyl
  misc_feature (13)..(13): 2'-deoxy-2'-fluoro
  misc_feature (14)..(17): 2'-O-methyl
  misc_feature (18)..(19): 2'-deoxy-2'-fluoro
  misc_feature (1)..(19): ribonucleotide modified as described
  misc_feature (20)..(21): internucleotide phosphorothioate linkage
caggcaguaccacaaggcctt

SEQ ID NO: 1832 - DNA, 21 bp, Artificial Sequence
  Description of Artificial Sequence: synthetic
  misc_feature (1)..(2): 2'-deoxy-2'-fluoro
  misc_feature (3)..(5): 2'-O-methyl
  misc_feature (6)..(6): 2'-deoxy-2'-fluoro
  misc_feature (7)..(8): 2'-O-methyl
  misc_feature (9)..(9): 2'-deoxy-2'-fluoro
  misc_feature (10)..(10): 2'-O-methyl
  misc_feature (11)..(12): 2'-deoxy-2'-fluoro
  misc_feature (13)..(13): 2'-O-methyl
  misc_feature (14)..(14): 2'-deoxy-2'-fluoro
  misc_feature (15)..(18): 2'-O-methyl
  misc_feature (19)..(19): 2'-deoxy-2'-fluoro
  misc_feature (1)..(19): ribonucleotide modified as described
  misc_feature (20)..(21): internucleotide phosphorothioate linkage
ucaggcaguaccacaaggctt

SEQ ID NO: 1833 - DNA, 21 bp, Artificial Sequence
  Description of Artificial Sequence: synthetic
  misc_feature (1)..(1): 2'-O-methyl
  misc_feature (2)..(3): 2'-deoxy-2'-fluoro
  misc_feature (4)..(6): 2'-O-methyl
  misc_feature (7)..(7): 2'-deoxy-2'-fluoro
  misc_feature (8)..(9): 2'-O-methyl
  misc_feature (10)..(10): 2'-deoxy-2'-fluoro
  misc_feature (11)..(11): 2'-O-methyl
  misc_feature (12)..(13): 2'-deoxy-2'-fluoro
  misc_feature (14)..(14): 2'-O-methyl
  misc_feature (15)..(15): 2'-deoxy-2'-fluoro
  misc_feature (16)..(19): 2'-O-methyl
  misc_feature (1)..(19): ribonucleotide modified as described
  misc_feature (20)..(21): internucleotide phosphorothioate linkage
aucaggcaguaccacaaggtt

SEQ ID NO: 1834 - DNA, 21 bp, Artificial Sequence
  Description of Artificial Sequence: synthetic
  misc_feature (1)..(3): 2'-O-methyl
  misc_feature (4)..(4): 2'-deoxy-2'-fluoro
  misc_feature (5)..(5): 2'-O-methyl
  misc_feature (6)..(9): 2'-deoxy-2'-fluoro
  misc_feature (10)..(10): 2'-O-methyl
  misc_feature (11)..(12): 2'-deoxy-2'-fluoro
  misc_feature (13)..(15): 2'-O-methyl
  misc_feature (16)..(16): 2'-deoxy-2'-fluoro
  misc_feature (17)..(18): 2'-O-methyl
  misc_feature (19)..(19): 2'-deoxy-2'-fluoro
  misc_feature (1)..(19): ribonucleotide modified as described
  misc_feature (20)..(21): internucleotide phosphorothioate linkage
aagcacccuaucaggcagutt

SEQ ID NO: 1835 - DNA, 21 bp, Artificial Sequence
  Description of Artificial Sequence: synthetic
  misc_feature (1)..(1): 2'-deoxy-2'-fluoro
  misc_feature (2)..(2): 2'-O-methyl
  misc_feature (3)..(3): 2'-deoxy-2'-fluoro
  misc_feature (4)..(6): 2'-O-methyl
  misc_feature (7)..(7): 2'-deoxy-2'-fluoro
  misc_feature (8)..(8): 2'-O-methyl
  misc_feature (9)..(12): 2'-deoxy-2'-fluoro
  misc_feature (13)..(13): 2'-O-methyl
  misc_feature (14)..(15): 2'-deoxy-2'-fluoro
  misc_feature (16)..(18): 2'-O-methyl
  misc_feature (19)..(19): 2'-deoxy-2'-fluoro
  misc_feature (1)..(19): ribonucleotide modified as described
  misc_feature (20)..(21): internucleotide phosphorothioate linkage
cgcaagcacccuaucaggctt

SEQ ID NO: 1836 - DNA, 21 bp, Artificial Sequence
  Description of Artificial Sequence: synthetic
  misc_feature (1)..(3): 2'-deoxy-2'-fluoro
  misc_feature (4)..(4): 2'-O-methyl
  misc_feature (5)..(5): 2'-deoxy-2'-fluoro
  misc_feature (6)..(8): 2'-O-methyl
  misc_feature (9)..(9): 2'-deoxy-2'-fluoro
  misc_feature (10)..(10): 2'-O-methyl
  misc_feature (11)..(14): 2'-deoxy-2'-fluoro
  misc_feature (15)..(15): 2'-O-methyl
  misc_feature (16)..(17): 2'-deoxy-2'-fluoro
  misc_feature (18)..(19): 2'-O-methyl
  misc_feature (1)..(19): ribonucleotide modified as described
  misc_feature (20)..(21): internucleotide phosphorothioate linkage
cucgcaagcacccuaucagtt

SEQ ID NO: 1837 - DNA, 21 bp, Artificial Sequence
  Description of Artificial Sequence: synthetic
  misc_feature (1)..(1): 2'-O-methyl
  misc_feature (2)..(4): 2'-deoxy-2'-fluoro
  misc_feature (5)..(5): 2'-O-methyl
  misc_feature (6)..(6): 2'-deoxy-2'-fluoro
  misc_feature (7)..(9): 2'-O-methyl
  misc_feature (10)..(10): 2'-deoxy-2'-fluoro
  misc_feature (11)..(11): 2'-O-methyl
  misc_feature (12)..(15): 2'-deoxy-2'-fluoro
  misc_feature (16)..(16): 2'-O-methyl
  misc_feature (17)..(18): 2'-deoxy-2'-fluoro
  misc_feature (19)..(19): 2'-O-methyl
  misc_feature (1)..(19): ribonucleotide modified as described
  misc_feature (20)..(21): internucleotide phosphorothioate linkage
acucgcaagcacccuaucatt

SEQ ID NO: 1838 - DNA, 21 bp, Artificial Sequence
  Description of Artificial Sequence: synthetic
  misc_feature (1)..(1): 2'-O-methyl
  misc_feature (2)..(2): 2'-deoxy-2'-fluoro
  misc_feature (3)..(3): 2'-O-methyl
  misc_feature (4)..(6): 2'-deoxy-2'-fluoro
  misc_feature (7)..(7): 2'-O-methyl
  misc_feature (8)..(8): 2'-deoxy-2'-fluoro
  misc_feature (9)..(11): 2'-O-methyl
  misc_feature (12)..(12): 2'-deoxy-2'-fluoro
  misc_feature (13)..(13): 2'-O-methyl
  misc_feature (14)..(17): 2'-deoxy-2'-fluoro
  misc_feature (18)..(18): 2'-O-methyl
  misc_feature (19)..(19): 2'-deoxy-2'-fluoro
  misc_feature (1)..(19): ribonucleotide modified as described
  misc_feature (20)..(21): internucleotide phosphorothioate linkage
gcacucgcaagcacccuautt

SEQ ID NO: 1839 - DNA, 21 bp, Artificial Sequence
  Description of Artificial Sequence: synthetic
  misc_feature (1)..(2): 2'-O-methyl
  misc_feature (3)..(3): 2'-deoxy-2'-fluoro
  misc_feature (4)..(4): 2'-O-methyl
  misc_feature (5)..(7): 2'-deoxy-2'-fluoro
  misc_feature (8)..(8): 2'-O-methyl
  misc_feature (9)..(9): 2'-deoxy-2'-fluoro
  misc_feature (10)..(12): 2'-O-methyl
  misc_feature (13)..(13): 2'-deoxy-2'-fluoro
  misc_feature (14)..(14): 2'-O-methyl
  misc_feature (15)..(18): 2'-deoxy-2'-fluoro
  misc_feature (19)..(19): 2'-O-methyl
  misc_feature (1)..(19): ribonucleotide modified as described
  misc_feature (20)..(21): internucleotide phosphorothioate linkage
ggcacucgcaagcacccuatt

SEQ ID NO: 1840 - DNA, 21 bp, Artificial Sequence
  Description of Artificial Sequence: synthetic
  misc_feature (1)..(4): 2'-O-methyl
  misc_feature (5)..(5): 2'-deoxy-2'-fluoro
  misc_feature (6)..(6): 2'-O-methyl
  misc_feature (7)..(9): 2'-deoxy-2'-fluoro
  misc_feature (10)..(10): 2'-O-methyl
  misc_feature (11)..(11): 2'-deoxy-2'-fluoro
  misc_feature (12)..(14): 2'-O-methyl
  misc_feature (15)..(15): 2'-deoxy-2'-fluoro
  misc_feature (16)..(16): 2'-O-methyl
  misc_feature (17)..(19): 2'-deoxy-2'-fluoro
  misc_feature (1)..(19): ribonucleotide modified as described
  misc_feature (20)..(21): internucleotide phosphorothioate linkage
ggggcacucgcaagcaccctt

SEQ ID NO: 1841 - DNA, 21 bp, Artificial Sequence
  Description of Artificial Sequence: synthetic
  misc_feature (1)..(1): 2'-deoxy-2'-fluoro
  misc_feature (2)..(5): 2'-O-methyl
  misc_feature (6)..(6): 2'-deoxy-2'-fluoro
  misc_feature (7)..(7): 2'-O-methyl
  misc_feature (8)..(10): 2'-deoxy-2'-fluoro
  misc_feature (11)..(11): 2'-O-methyl
  misc_feature (12)..(12): 2'-deoxy-2'-fluoro
  misc_feature (13)..(15): 2'-O-methyl
  misc_feature (16)..(16): 2'-deoxy-2'-fluoro
  misc_feature (17)..(17): 2'-O-methyl
  misc_feature (18)..(19): 2'-deoxy-2'-fluoro
  misc_feature (1)..(19): ribonucleotide modified as described
  misc_feature (20)..(21): internucleotide phosphorothioate linkage
cggggcacucgcaagcacctt

SEQ ID NO: 1842 - DNA, 21 bp, Artificial Sequence
  Description of Artificial Sequence: synthetic
  misc_feature (1)..(4): 2'-deoxy-2'-fluoro
  misc_feature (5)..(8): 2'-O-methyl
  misc_feature (9)..(9): 2'-deoxy-2'-fluoro
  misc_feature (10)..(10): 2'-O-methyl
  misc_feature (11)..(13): 2'-deoxy-2'-fluoro
  misc_feature (14)..(14): 2'-O-methyl
  misc_feature (15)..(15): 2'-deoxy-2'-fluoro
  misc_feature (16)..(18): 2'-O-methyl
  misc_feature (19)..(19): 2'-deoxy-2'-fluoro
  misc_feature (1)..(19): ribonucleotide modified as described
  misc_feature (20)..(21): internucleotide phosphorothioate linkage
ucccggggcacucgcaagctt

SEQ ID NO: 1843 - DNA, 21 bp, Artificial Sequence
  Description of Artificial Sequence: synthetic
  misc_feature (1)..(5): 2'-deoxy-2'-fluoro
  misc_feature (6)..(9): 2'-O-methyl
  misc_feature (10)..(10): 2'-deoxy-2'-fluoro
  misc_feature (11)..(11): 2'-O-methyl
  misc_feature (12)..(14): 2'-deoxy-2'-fluoro
  misc_feature (15)..(15): 2'-O-methyl
  misc_feature (16)..(16): 2'-deoxy-2'-fluoro
  misc_feature (17)..(19): 2'-O-methyl
  misc_feature (1)..(19): ribonucleotide modified as described
  misc_feature (20)..(21): internucleotide phosphorothioate linkage
cucccggggcacucgcaagtt

SEQ ID NO: 1844 - DNA, 21 bp, Artificial Sequence
  Description of Artificial Sequence: synthetic
  misc_feature (1)..(6): 2'-deoxy-2'-fluoro
  misc_feature (7)..(10): 2'-O-methyl
  misc_feature (11)..(11): 2'-deoxy-2'-fluoro
  misc_feature (12)..(12): 2'-O-methyl
  misc_feature (13)..(15): 2'-deoxy-2'-fluoro
  misc_feature (16)..(16): 2'-O-methyl
  misc_feature (17)..(17): 2'-deoxy-2'-fluoro
  misc_feature (18)..(19): 2'-O-methyl
  misc_feature (1)..(19): ribonucleotide modified as described
  misc_feature (20)..(21): internucleotide phosphorothioate linkage
ccucccggggcacucgcaatt

SEQ ID NO: 1845 - DNA, 21 bp, Artificial Sequence
  Description of Artificial Sequence: synthetic
  misc_feature (1)..(1): 2'-O-methyl
  misc_feature (2)..(7): 2'-deoxy-2'-fluoro
  misc_feature (8)..(11): 2'-O-methyl
  misc_feature (12)..(12): 2'-deoxy-2'-fluoro
  misc_feature (13)..(13): 2'-O-methyl
  misc_feature (14)..(16): 2'-deoxy-2'-fluoro
  misc_feature (17)..(17): 2'-O-methyl
  misc_feature (18)..(18): 2'-deoxy-2'-fluoro
  misc_feature (19)..(19): 2'-O-methyl
  misc_feature (1)..(19): ribonucleotide modified as described
  misc_feature (20)..(21): internucleotide phosphorothioate linkage
accucccggggcacucgcatt

SEQ ID NO: 1846 - DNA, 21 bp, Artificial Sequence
  Description of Artificial Sequence: synthetic
  misc_feature (1)..(2): 2'-O-methyl
  misc_feature (3)..(8): 2'-deoxy-2'-fluoro
  misc_feature (9)..(12): 2'-O-methyl
  misc_feature (13)..(13): 2'-deoxy-2'-fluoro
  misc_feature (14)..(14): 2'-O-methyl
  misc_feature (18)..(18): 2'-O-methyl
  misc_feature (19)..(19): 2'-deoxy-2'-fluoro
  misc_feature (20)..(21): internucleotide phosphorothioate linkage
  misc_feature (1)..(19): ribonucleotide modified as described
  misc_feature (26)..(28): 2'-deoxy-2'-fluoro
gaccucccggggcacucgctt

SEQ ID NO: 1847 - DNA, 21 bp, Artificial Sequence
  Description of Artificial Sequence: synthetic
  misc_feature (1)..(3): 2'-O-methyl
  misc_feature (4)..(9): 2'-deoxy-2'-fluoro
  misc_feature (10)..(13): 2'-O-methyl
  misc_feature (14)..(14): 2'-deoxy-2'-fluoro
  misc_feature (15)..(15): 2'-O-methyl
  misc_feature (16)..(18): 2'-deoxy-2'-fluoro
  misc_feature (19)..(19): 2'-O-methyl
  misc_feature (1)..(19): ribonucleotide modified as described
  misc_feature (20)..(21): internucleotide phosphorothioate linkage
agaccucccggggcacucgtt

SEQ ID NO: 1848 - DNA, 21 bp, Artificial Sequence
  Description of Artificial Sequence: synthetic
  misc_feature (1)..(4): 2'-O-methyl
  misc_feature (5)..(10): 2'-O-methyl
  misc_feature (11)..(14): 2'-O-methyl
  misc_feature (15)..(15): 2'-O-methyl
  misc_feature (16)..(16): 2'-O-methyl
  misc_feature (17)..(19): 2'-O-methyl
  misc_feature (1)..(19): ribonucleotide modified as described
  misc_feature (20)..(21): internucleotide phosphorothioate linkage
gagaccucccggggcacuctt

SEQ ID NO: 1849 - DNA, 21 bp, Artificial Sequence
  Description of Artificial Sequence: synthetic
  misc_feature (1)..(1): 2'-O-methyl
  misc_feature (2)..(2): 2'-deoxy-2'-fluoro
  misc_feature (3)..(6): 2'-O-methyl
  misc_feature (7)..(12): 2'-deoxy-2'-fluoro
  misc_feature (13)..(16): 2'-O-methyl
  misc_feature (17)..(17): 2'-deoxy-2'-fluoro
  misc_feature (18)..(18): 2'-O-methyl
  misc_feature (19)..(19): 2'-deoxy-2'-fluoro
  misc_feature (1)..(19): ribonucleotide modified as described
  misc_feature (20)..(21): internucleotide phosphorothioate linkage
acgagaccucccggggcactt

SEQ ID NO: 1850 - DNA, 21 bp, Artificial Sequence
  Description of Artificial Sequence: synthetic
  misc_feature (1)..(1): 2'-deoxy-2'-fluoro
  misc_feature (2)..(2): 2'-O-methyl
  misc_feature (3)..(3): 2'-deoxy-2'-fluoro
  misc_feature (4)..(7): 2'-O-methyl
  misc_feature (8)..(13): 2'-deoxy-2'-fluoro
  misc_feature (14)..(17): 2'-O-methyl
  misc_feature (18)..(18): 2'-deoxy-2'-fluoro
  misc_feature (19)..(19): 2'-O-methyl
  misc_feature (1)..(19): ribonucleotide modified as described
  misc_feature (20)..(21): internucleotide phosphorothioate linkage
uacgagaccucccggggcatt

SEQ ID NO: 1851 - DNA, 21 bp, Artificial Sequence
  Description of Artificial Sequence: synthetic
  misc_feature (1)..(1): 2'-deoxy-2'-fluoro
  misc_feature (2)..(2): 2'-O-methyl
  misc_feature (3)..(3): 2'-deoxy-2'-fluoro
  misc_feature (4)..(5): 2'-O-methyl
  misc_feature (6)..(8): 2'-deoxy-2'-fluoro
  misc_feature (9)..(9): 2'-O-methyl
  misc_feature (10)..(10): 2'-deoxy-2'-fluoro
  misc_feature (11)..(14): 2'-O-methyl
  misc_feature (15)..(19): 2'-deoxy-2'-fluoro
  misc_feature (1)..(19): ribonucleotide modified as described
  misc_feature (20)..(21): internucleotide phosphorothioate linkage
cacggucuacgagaccucctt

SEQ ID NO: 1852 - DNA, 21 bp, Artificial Sequence
  Description of Artificial Sequence: synthetic
  misc_feature (1)..(1): terminal phosphate group
  misc_feature (1)..(2): 2'-deoxy-2'-fluoro
  misc_feature (3)..(3): 2'-O-methyl
  misc_feature (4)..(4): 2'-deoxy-2'-fluoro
  misc_feature (5)..(7): 2'-O-methyl
  misc_feature (8)..(8): 2'-deoxy-2'-fluoro
  misc_feature (9)..(9): 2'-O-methyl
  misc_feature (10)..(13): 2'-deoxy-2'-fluoro
  misc_feature (14)..(14): 2'-O-methyl
  misc_feature (15)..(16): 2'-deoxy-2'-fluoro
  misc_feature (17)..(19): 2'-O-methyl
  misc_feature (1)..(19): ribonucleotide modified as described
  misc_feature (20)..(21): internucleotide phosphorothioate linkage
ucgcaagcacccuaucaggtt

SEQ ID NO: 1853 - DNA, 21 bp, Artificial Sequence
  Description of Artificial Sequence: synthetic
  misc_feature (1)..(1): terminal phosphate group
  misc_feature (1)..(2): 2'-deoxy-2'-fluoro
  misc_feature (4)..(4): 2'-deoxy-2'-fluoro
  misc_feature (8)..(8): 2'-deoxy-2'-fluoro
  misc_feature (10)..(13): 2'-deoxy-2'-fluoro
  misc_feature (15)..(16): 2'-deoxy-2'-fluoro
  misc_feature (1)..(19): ribonucleotide modified as described
  misc_feature (20)..(21): internucleotide phosphorothioate linkage
ucgcaagcacccuaucaggtt

SEQ ID NO: 1854 - DNA, 21 bp, Artificial Sequence
  Description of Artificial Sequence: synthetic
  misc_feature (1)..(1): terminal phosphate group
  misc_feature (2)..(5): 2'-deoxy-2'-fluoro
  misc_feature (7)..(8): 2'-deoxy-2'-fluoro
  misc_feature (12)..(12): 2'-deoxy-2'-fluoro
  misc_feature (15)..(15): 2'-deoxy-2'-fluoro
  misc_feature (17)..(18): 2'-deoxy-2'-fluoro
  misc_feature (1)..(19): ribonucleotide modified as described
  misc_feature (20)..(21): internucleotide phosphorothioate linkage
acccuaucaggcaguaccatt

SEQ ID NO: 1855 - DNA, 21 bp, Artificial Sequence
  Description of Artificial Sequence: synthetic
  misc_feature (1)..(1): terminal phosphate group
  misc_feature (1)..(1): 2'-O-methyl
  misc_feature (2)..(5): 2'-deoxy-2'-fluoro
  misc_feature (6)..(6): 2'-O-methyl
  misc_feature (7)..(8): 2'-deoxy-2'-fluoro
  misc_feature (9)..(11): 2'-O-methyl
  misc_feature (12)..(12): 2'-deoxy-2'-fluoro
  misc_feature (13)..(14): 2'-O-methyl
  misc_feature (15)..(15): 2'-deoxy-2'-fluoro
  misc_feature (16)..(16): 2'-O-methyl
  misc_feature (17)..(18): 2'-deoxy-2'-fluoro
  misc_feature (19)..(19): 2'-O-methyl
  misc_feature (1)..(19): ribonucleotide modified as described
  misc_feature (20)..(21): internucleotide phosphorothioate linkage
acccuaucaggcaguaccatt

SEQ ID NO: 1856 - DNA, 21 bp, Artificial Sequence
  Description of Artificial Sequence: synthetic
  misc_feature (1)..(1): terminal phosphate group
  misc_feature (1)..(1): 2'-deoxy-2'-fluoro
  misc_feature (2)..(2): 2'-O-methyl
  misc_feature (3)..(5): 2'-deoxy-2'-fluoro
  misc_feature (6)..(6): 2'-O-methyl
  misc_feature (7)..(7): 2'-deoxy-2'-fluoro
  misc_feature (8)..(10): 2'-O-methyl
  misc_feature (11)..(11): 2'-deoxy-2'-fluoro
  misc_feature (12)..(12): 2'-O-methyl
  misc_feature (13)..(16): 2'-deoxy-2'-fluoro
  misc_feature (17)..(17): 2'-O-methyl
  misc_feature (18)..(19): 2'-deoxy-2'-fluoro
  misc_feature (1)..(19): ribonucleotide modified as described
  misc_feature (20)..(21): internucleotide phosphorothioate linkage
cacucgcaagcacccuauctt

SEQ ID NO: 1857 - DNA, 21 bp, Artificial Sequence
  Description of Artificial Sequence: synthetic
  misc_feature (1)..(1): terminal phosphate group
  misc_feature (1)..(2): 2'-O-methyl
  misc_feature (3)..(5): 2'-deoxy-2'-fluoro
  misc_feature (6)..(6): 2'-O-methyl
  misc_feature (7)..(7): 2'-deoxy-2'-fluoro
  misc_feature (8)..(11): 2'-O-methyl
  misc_feature (12)..(17): 2'-deoxy-2'-fluoro
  misc_feature (18)..(19): 2'-O-methyl
  misc_feature (1)..(19): ribonucleotide modified as described
  misc_feature (20)..(21): internucleotide phosphorothioate linkage
ggucuacgagaccucccggtt

SEQ ID NO: 1858 - DNA, 21 bp, Artificial Sequence
  Description of Artificial Sequence: synthetic
  misc_feature (1)..(1): terminal hexethelyne glycol
  misc_feature (1)..(2): 2'-deoxy-2'-fluoro
  misc_feature (3)..(3): 2'-O-methyl
  misc_feature (4)..(4): 2'-deoxy-2'-fluoro
  misc_feature (5)..(7): 2'-O-methyl
  misc_feature (8)..(8): 2'-deoxy-2'-fluoro
  misc_feature (9)..(9): 2'-O-methyl
  misc_feature (10)..(13): 2'-deoxy-2'-fluoro
  misc_feature (14)..(14): 2'-O-methyl
  misc_feature (15)..(16): 2'-deoxy-2'-fluoro
  misc_feature (17)..(19): 2'-O-methyl
  misc_feature (1)..(19): ribonucleotide modified as described
  misc_feature (20)..(21): internucleotide phosphorothioate linkage
ucgcaagcacccuaucaggtt

SEQ ID NO: 1859 - DNA, 21 bp, Artificial Sequence
  Description of Artificial Sequence: synthetic
  misc_feature (1)..(1): terminal hexethelyne glycol
  misc_feature (1)..(2): 2'-deoxy-2'-fluoro
  misc_feature (4)..(4): 2'-deoxy-2'-fluoro
  misc_feature (8)..(8): 2'-deoxy-2'-fluoro
  misc_feature (10)..(13): 2'-deoxy-2'-fluoro
  misc_feature (15)..(16): 2'-deoxy-2'-fluoro
  misc_feature (1)..(19): ribonucleotide modified as described
  misc_feature (20)..(21): internucleotide phosphorothioate linkage
ucgcaagcacccuaucaggtt

SEQ ID NO: 1860 - DNA, 21 bp, Artificial Sequence
  Description of Artificial Sequence: synthetic
  misc_feature (1)..(1): terminal hexethelyne glycol
  misc_feature (2)..(5): 2'-deoxy-2'-fluoro
  misc_feature (7)..(8): 2'-deoxy-2'-fluoro
  misc_feature (12)..(12): 2'-deoxy-2'-fluoro
  misc_feature (15)..(15): 2'-deoxy-2'-fluoro
  misc_feature (17)..(18): 2'-deoxy-2'-fluoro
  misc_feature (1)..(19): ribonucleotide modified as described
  misc_feature (20)..(21): internucleotide phosphorothioate linkage
acccuaucaggcaguaccatt

SEQ ID NO: 1861 - DNA, 21 bp, Artificial Sequence
  Description of Artificial Sequence: synthetic
  misc_feature (1)..(1): terminal hexethelyne glycol
  misc_feature (1)..(1): 2'-O-methyl
  misc_feature (2)..(5): 2'-deoxy-2'-fluoro
  misc_feature (6)..(6): 2'-O-methyl
  misc_feature (7)..(8): 2'-deoxy-2'-fluoro
  misc_feature (9)..(11): 2'-O-methyl
  misc_feature (12)..(12): 2'-deoxy-2'-fluoro
  misc_feature (13)..(14): 2'-O-methyl
  misc_feature (15)..(15): 2'-deoxy-2'-fluoro
  misc_feature (16)..(16): 2'-O-methyl
  misc_feature (17)..(18): 2'-deoxy-2'-fluoro
  misc_feature (19)..(19): 2'-O-methyl
  misc_feature (1)..(19): ribonucleotide modified as described
  misc_feature (20)..(21): internucleotide phosphorothioate linkage
acccuaucaggcaguaccatt

SEQ ID NO: 1862 - DNA, 21 bp, Artificial Sequence
  Description of Artificial Sequence: synthetic
  misc_feature (1)..(1): terminal hexethelyne glycol
  misc_feature (1)..(1): 2'-deoxy-2'-fluoro
  misc_feature (2)..(2): 2'-O-methyl
  misc_feature (3)..(5): 2'-deoxy-2'-fluoro
  misc_feature (6)..(6): 2'-O-methyl
  misc_feature (7)..(7): 2'-deoxy-2'-fluoro
  misc_feature (8)..(10): 2'-O-methyl
  misc_feature (11)..(11): 2'-deoxy-2'-fluoro
  misc_feature (12)..(12): 2'-O-methyl
  misc_feature (13)..(16): 2'-deoxy-2'-fluoro
  misc_feature (17)..(17): 2'-O-methyl
  misc_feature (18)..(19): 2'-deoxy-2'-fluoro
  misc_feature (1)..(19): ribonucleotide modified as described
  misc_feature (20)..(21): internucleotide phosphorothioate linkage
cacucgcaagcacccuauctt

SEQ ID NO: 1863 - DNA, 21 bp, Artificial Sequence
  Description of Artificial Sequence: synthetic
  misc_feature (1)..(1): terminal hexethelyne glycol
  misc_feature (1)..(2): 2'-O-methyl
  misc_feature (3)..(5): 2'-deoxy-2'-fluoro
  misc_feature (6)..(6): 2'-O-methyl
  misc_feature (7)..(7): 2'-deoxy-2'-fluoro
  misc_feature (8)..(11): 2'-O-methyl
  misc_feature (12)..(17): 2'-deoxy-2'-fluoro
  misc_feature (18)..(19): 2'-O-methyl
  misc_feature (1)..(19): ribonucleotide modified as described
  misc_feature (20)..(21): internucleotide phosphorothioate linkage
ggucuacgagaccucccggtt

SEQ ID NO: 1864 - DNA, 21 bp, Artificial Sequence
  Description of Artificial Sequence: synthetic
  misc_feature (1)..(1): 5'-3 attached terminal deoxyabasic moiety
  misc_feature (1)..(2): 2'-deoxy-2'-fluoro
  misc_feature (9)..(10): 2'-deoxy-2'-fluoro
  misc_feature (12)..(12): 2'-deoxy-2'-fluoro
  misc_feature (14)..(14): 2'-deoxy-2'-fluoro
  misc_feature (17)..(19): 2'-deoxy-2'-fluoro
  misc_feature (1)..(19): ribonucleotide modified as described
  misc_feature (21)..(21): 3'-3 attached terminal deoxyabasic moiety
ccgagaggucgcguagucctt

SEQ ID NO: 1865 - DNA, 21 bp, Artificial Sequence
  Description of Artificial Sequence: synthetic
  misc_feature (1)..(1): 5'-3 attached terminal deoxyabasic moiety
  misc_feature (1)..(2): 2'-deoxy-2'-fluoro
  misc_feature (9)..(10): 2'-deoxy-2'-fluoro
  misc_feature (12)..(12): 2'-deoxy-2'-fluoro
  misc_feature (14)..(15): 2'-deoxy-2'-fluoro
  misc_feature (18)..(19): 2'-deoxy-2'-fluoro
  misc_feature (1)..(19): ribonucleotide modified as described
  misc_feature (21)..(21): 3'-3 attached terminal deoxyabasic moiety
ccgagaggucgcgucgauctt

SEQ ID NO: 1866 - DNA, 21 bp, Artificial Sequence
  Description of Artificial Sequence: synthetic
  misc_feature (1)..(1): 5'-3 attached terminal deoxyabasic moiety
  misc_feature (1)..(2): 2'-deoxy-2'-fluoro
  misc_feature (5)..(5): 2'-deoxy-2'-fluoro
  misc_feature (9)..(12): 2'-deoxy-2'-fluoro
  misc_feature (14)..(14): 2'-deoxy-2'-fluoro
  misc_feature (18)..(18): 2'-deoxy-2'-fluoro
  misc_feature (1)..(19): ribonucleotide modified as described
  misc_feature (21)..(21): 3'-3 attached terminal deoxyabasic moiety
ccgguaggucccguggacatt

SEQ ID NO: 1867 - DNA, 21 bp, Artificial Sequence
  Description of Artificial Sequence: synthetic
  misc_feature (1)..(3): 2'-O-methyl
  misc_feature (4)..(5): 2'-deoxy-2'-fluoro
  misc_feature (6)..(6): 2'-O-methyl
  misc_feature (7)..(7): 2'-deoxy-2'-fluoro
  misc_feature (8)..(8): 2'-O-methyl
  misc_feature (9)..(9): 2'-deoxy-2'-fluoro
  misc_feature (10)..(11): 2'-O-methyl
  misc_feature (12)..(17): 2'-deoxy-2'-fluoro
  misc_feature (18)..(19): 2'-O-methyl
  misc_feature (1)..(19): ribonucleotide modified as described
  misc_feature (20)..(21): internucleotide phosphorothioate linkage
ggacuacgcgaccucucggtt

SEQ ID NO: 1868 - DNA, 21 bp, Artificial Sequence
  Description of Artificial Sequence: synthetic
  misc_feature (1)..(2): 2'-O-methyl
  misc_feature (3)..(4): 2'-deoxy-2'-fluoro
  misc_feature (5)..(6): 2'-O-methyl
  misc_feature (7)..(7): 2'-deoxy-2'-fluoro
  misc_feature (8)..(8): 2'-O-methyl
  misc_feature (9)..(9): 2'-deoxy-2'-fluoro
  misc_feature (10)..(11): 2'-O-methyl
  misc_feature (12)..(17): 2'-deoxy-2'-fluoro
  misc_feature (18)..(19): 2'-O-methyl
  misc_feature (1)..(19): ribonucleotide modified as described
  misc_feature (20)..(21): internucleotide phosphorothioate linkage
gaucgacgcgaccucucggtt

SEQ ID NO: 1869 - DNA, 21 bp, Artificial Sequence
  Description of Artificial Sequence: synthetic
  misc_feature (1)..(1): 2'-deoxy-2'-fluoro
  misc_feature (2)..(2): 2'-O-methyl
  misc_feature (3)..(5): 2'-deoxy-2'-fluoro
  misc_feature (6)..(6): 2'-O-methyl
  misc_feature (7)..(7): 2'-deoxy-2'-fluoro
  misc_feature (8)..(11): 2'-O-methyl
  misc_feature (12)..(14): 2'-deoxy-2'-fluoro
  misc_feature (15)..(15): 2'-O-methyl
  misc_feature (16)..(17): 2'-deoxy-2'-fluoro
  misc_feature (18)..(19): 2'-O-methyl
  misc_feature (1)..(19): ribonucleotide modified as described
  misc_feature (20)..(21): internucleotide phosphorothioate linkage
uguccacgggaccuaccggtt

SEQ ID NO: 1870 - DNA, 21 bp, Artificial Sequence
  Description of Artificial Sequence: synthetic
  misc_feature (1)..(1): 5'-3 attached terminal deoxyabasic moiety
  misc_feature (1)..(1): 2'-deoxy
  misc_feature (2)..(3): 2'-deoxy-2'-fluoro
  misc_feature (4)..(8): 2'-deoxy
  misc_feature (9)..(9): 2'-deoxy-2'-fluoro
  misc_feature (10)..(10): 2'-deoxy
  misc_feature (11)..(12): 2'-deoxy-2'-fluoro
  misc_feature (13)..(13): 2'-deoxy
  misc_feature (14)..(14): 2'-deoxy-2'-fluoro
  misc_feature (15)..(16): 2'-deoxy
  misc_feature (17)..(17): 2'-deoxy-2'-fluoro
  misc_feature (18)..(18): 2'-deoxy
  misc_feature (19)..(19): 2'-deoxy-2'-fluoro
  misc_feature (1)..(19): ribonucleotide modified as described
  misc_feature (21)..(21): 3'-3 attached terminal deoxyabasic moiety
gcuaaaggcguuguggcactt

SEQ ID NO: 1871 - DNA, 21 bp, Artificial Sequence
  Description of Artificial Sequence: synthetic
  misc_feature (1)..(1): 5'-3 attached terminal deoxyabasic moiety
  misc_feature (1)..(1): 2'-deoxy
  misc_feature (2)..(2): 2'-deoxy-2'-fluoro
  misc_feature (3)..(3): 2'-deoxy
  misc_feature (4)..(4): 2'-deoxy-2'-fluoro
  misc_feature (5)..(8): 2'-deoxy
  misc_feature (9)..(12): 2'-deoxy-2'-fluoro
  misc_feature (13)..(13): 2'-deoxy
  misc_feature (14)..(14): 2'-deoxy-2'-fluoro
  misc_feature (15)..(16): 2'-deoxy
  misc_feature (17)..(17): 2'-deoxy-2'-fluoro
  misc_feature (18)..(19): 2'-deoxy
  misc_feature (1)..(19): ribonucleotide modified as described
  misc_feature (21)..(21): 3'-3 attached terminal deoxyabasic moiety
gcguaaggcccugugguaatt

SEQ ID NO: 1872 - DNA, 21 bp, Artificial Sequence
  Description of Artificial Sequence: synthetic
  misc_feature (1)..(1): 5'-3 attached terminal deoxyabasic moiety
  misc_feature (1)..(6): 2'-deoxy
  misc_feature (7)..(7): 2'-deoxy-2'-fluoro
  misc_feature (8)..(8): 2'-deoxy
  misc_feature (9)..(11): 2'-deoxy-2'-fluoro
  misc_feature (12)..(13): 2'-deoxy
  misc_feature (14)..(14): 2'-deoxy-2'-fluoro
  misc_feature (15)..(16): 2'-deoxy
  misc_feature (17)..(19): 2'-deoxy-2'-fluoro
  misc_feature (1)..(19): ribonucleotide modified as described
  misc_feature (21)..(21): 3'-3 attached terminal deoxyabasic moiety
gagaaacgccuggugguuctt

SEQ ID NO: 1873 - DNA, 21 bp, Artificial Sequence
  Description of Artificial Sequence: synthetic
  misc_feature (1)..(1): 5'-3 attached terminal deoxyabasic moiety
  misc_feature (1)..(1): 2'-deoxy-2'-fluoro
  misc_feature (2)..(2): 2'-deoxy
  misc_feature (3)..(3): 2'-deoxy-2'-fluoro
  misc_feature (4)..(7): 2'-deoxy
  misc_feature (8)..(8): 2'-deoxy-2'-fluoro
  misc_feature (9)..(9): 2'-deoxy
  misc_feature (10)..(11): 2'-deoxy-2'-fluoro
  misc_feature (12)..(12): 2'-deoxy
  misc_feature (13)..(13): 2'-deoxy-2'-fluoro
  misc_feature (14)..(15): 2'-deoxy
  misc_feature (16)..(16): 2'-deoxy-2'-fluoro
  misc_feature (17)..(17): 2'-deoxy
  misc_feature (18)..(19): 2'-deoxy-2'-fluoro
  misc_feature (1)..(19): ribonucleotide modified as described
  misc_feature (21)..(21): 3'-3 attached terminal deoxyabasic moiety
cguaaggcauuguggcacutt

SEQ ID NO: 1874 - DNA, 21 bp, Artificial Sequence
  Description of Artificial Sequence: synthetic
  misc_feature (1)..(1): 5'-3 attached terminal deoxyabasic moiety
  misc_feature (1)..(1): 2'-deoxy-2'-fluoro
  misc_feature (2)..(7): 2'-deoxy
  misc_feature (8)..(8): 2'-deoxy-2'-fluoro
  misc_feature (9)..(9): 2'-deoxy
  misc_feature (10)..(11): 2'-deoxy-2'-fluoro
  misc_feature (12)..(12): 2'-deoxy
  misc_feature (13)..(13): 2'-deoxy-2'-fluoro
  misc_feature (14)..(14): 2'-deoxy
  misc_feature (15)..(16): 2'-deoxy-2'-fluoro
  misc_feature (17)..(17): 2'-deoxy
  misc_feature (18)..(19): 2'-deoxy-2'-fluoro
  misc_feature (1)..(19): ribonucleotide modified as described
  misc_feature (21)..(21): 3'-3 attached terminal deoxyabasic moiety
cgagaggcauugugcuacutt

SEQ ID NO: 1875 - DNA, 21 bp, Artificial Sequence
  Description of Artificial Sequence: synthetic
  misc_feature (1)..(1): 5'-3 attached terminal deoxyabasic moiety
  misc_feature (1)..(2): 2'-deoxy-2'-fluoro
  misc_feature (3)..(7): 2'-deoxy
  misc_feature (8)..(11): 2'-deoxy-2'-fluoro
  misc_feature (12)..(15): 2'-deoxy
  misc_feature (16)..(16): 2'-deoxy-2'-fluoro
  misc_feature (17)..(17): 2'-deoxy
  misc_feature (18)..(19): 2'-deoxy-2'-fluoro
  misc_feature (1)..(19): ribonucleotide modified as described
  misc_feature (21)..(21): 3'-3 attached terminal deoxyabasic moiety
ccaaaggucuugaggugcutt

SEQ ID NO: 1876 - DNA, 21 bp, Artificial Sequence
  Description of Artificial Sequence: synthetic
  misc_feature (1)..(1): 5'-3 attached terminal deoxyabasic moiety
  misc_feature (1)..(1): 2'-deoxy-2'-fluoro
  misc_feature (2)..(4): 2'-deoxy
  misc_feature (5)..(5): 2'-deoxy-2'-fluoro
  misc_feature (6)..(8): 2'-deoxy
  misc_feature (9)..(10): 2'-deoxy-2'-fluoro
  misc_feature (11)..(11): 2'-deoxy
  misc_feature (12)..(14): 2'-deoxy-2'-fluoro
  misc_feature (15)..(15): 2'-deoxy
  misc_feature (16)..(16): 2'-deoxy-2'-fluoro
  misc_feature (17)..(19): 2'-deoxy
  misc_feature (1)..(19): ribonucleotide modified as described
  misc_feature (21)..(21): 3'-3 attached terminal deoxyabasic moiety
cggauaggcugcuugugagtt

SEQ ID NO: 1877 - DNA, 21 bp, Artificial Sequence
  Description of Artificial Sequence: synthetic
  misc_feature (1)..(1): 5'-3 attached terminal deoxyabasic moiety
  misc_feature (1)..(2): 2'-deoxy-2'-fluoro
  misc_feature (3)..(3): 2'-deoxy
  misc_feature (4)..(5): 2'-deoxy-2'-fluoro
  misc_feature (6)..(9): 2'-deoxy
  misc_feature (10)..(10): 2'-deoxy-2'-fluoro
  misc_feature (11)..(11): 2'-deoxy
  misc_feature (12)..(14): 2'-deoxy-2'-fluoro
  misc_feature (15)..(19): 2'-deoxy
  misc_feature (1)..(19): ribonucleotide modified as described
  misc_feature (21)..(21): 3'-3 attached terminal deoxyabasic moiety
cugcuaggguacuugggagtt

SEQ ID NO: 1878 - DNA, 21 bp, Artificial Sequence
  Description of Artificial Sequence: synthetic
  misc_feature (1)..(1): 5'-3 attached terminal deoxyabasic moiety
  misc_feature (1)..(2): 2'-deoxy-2'-fluoro
  misc_feature (3)..(4): 2'-deoxy
  misc_feature (5)..(5): 2'-deoxy-2'-fluoro
  misc_feature (6)..(6): 2'-deoxy
  misc_feature (7)..(7): 2'-deoxy-2'-fluoro
  misc_feature (8)..(9): 2'-deoxy
  misc_feature (10)..(10): 2'-deoxy-2'-fluoro
  misc_feature (11)..(12): 2'-deoxy
  misc_feature (13)..(14): 2'-deoxy-2'-fluoro
  misc_feature (15)..(15): 2'-deoxy
  misc_feature (16)..(16): 2'-deoxy-2'-fluoro
  misc_feature (17)..(19): 2'-deoxy
  misc_feature (1)..(19): ribonucleotide modified as described
  misc_feature (21)..(21): 3'-3 attached terminal deoxyabasic moiety
ccgauauggugauugcgggtt

SEQ ID NO: 1879 - DNA, 21 bp, Artificial Sequence
  Description of Artificial Sequence: synthetic
  misc_feature (1)..(1): 5'-3 attached terminal deoxyabasic moiety
  misc_feature (1)..(1): 2'-deoxy
  misc_feature (2)..(3): 2'-deoxy-2'-fluoro
  misc_feature (4)..(6): 2'-deoxy
  misc_feature (7)..(7): 2'-deoxy-2'-fluoro
  misc_feature (8)..(8): 2'-deoxy
  misc_feature (9)..(10): 2'-deoxy-2'-fluoro
  misc_feature (11)..(12): 2'-deoxy
  misc_feature (13)..(13): 2'-deoxy-2'-fluoro
  misc_feature (14)..(16): 2'-deoxy
  misc_feature (17)..(17): 2'-deoxy-2'-fluoro
  misc_feature (18)..(18): 2'-deoxy
  misc_feature (19)..(19): 2'-deoxy-2'-fluoro
  misc_feature (1)..(19): ribonucleotide modified as described
  misc_feature (21)..(21): 3'-3 attached terminal deoxyabasic moiety
auugggugcuggcgaguactt

SEQ ID NO: 1880 - DNA, 21 bp, Artificial Sequence
  Description of Artificial Sequence: synthetic
  misc_feature (1)..(1): 5'-3 attached terminal deoxyabasic moiety
  misc_feature (1)..(1): 2'-deoxy
  misc_feature (2)..(2): 2'-deoxy-2'-fluoro
  misc_feature (3)..(3): 2'-deoxy
  misc_feature (4)..(4): 2'-deoxy-2'-fluoro
  misc_feature (5)..(6): 2'-deoxy
  misc_feature (7)..(7): 2'-deoxy-2'-fluoro
  misc_feature (8)..(8): 2'-deoxy
  misc_feature (9)..(11): 2'-deoxy-2'-fluoro
  misc_feature (12)..(12): 2'-deoxy
  misc_feature (13)..(13): 2'-deoxy-2'-fluoro
  misc_feature (14)..(16): 2'-deoxy
  misc_feature (17)..(17): 2'-deoxy-2'-fluoro
  misc_feature (18)..(19): 2'-deoxy
  misc_feature (1)..(19): ribonucleotide modified as described
  misc_feature (21)..(21): 3'-3 attached terminal deoxyabasic moiety
auauggugccugcgaguggtt

SEQ ID NO: 1881 - DNA, 21 bp, Artificial Sequence
  Description of Artificial Sequence: synthetic
  misc_feature (1)..(1): 5'-3 attached terminal deoxyabasic moiety
  misc_feature (1)..(6): 2'-deoxy
  misc_feature (7)..(7): 2'-deoxy-2'-fluoro
  misc_feature (8)..(8): 2'-deoxy
  misc_feature (9)..(11): 2'-deoxy-2'-fluoro
  misc_feature (12)..(12): 2'-deoxy
  misc_feature (13)..(13): 2'-deoxy-2'-fluoro
  misc_feature (14)..(14): 2'-deoxy
  misc_feature (15)..(15): 2'-deoxy-2'-fluoro
  misc_feature (16)..(16): 2'-deoxy
  misc_feature (17)..(17): 2'-deoxy-2'-fluoro
  misc_feature (18)..(18): 2'-deoxy
  misc_feature (19)..(19): 2'-deoxy-2'-fluoro
  misc_feature (1)..(19): ribonucleotide modified as described
  misc_feature (21)..(21): 3'-3 attached terminal deoxyabasic moiety
agaggguacuugcgcgugutt

SEQ ID NO: 1882 - DNA, 21 bp, Artificial Sequence
  Description of Artificial Sequence: synthetic
  misc_feature (1)..(1): 2'-O-methyl
  misc_feature (2)..(2): 2'-deoxy-2'-fluoro
  misc_feature (3)..(3): 2'-O-methyl
  misc_feature (4)..(5): 2'-deoxy-2'-fluoro
  misc_feature (6)..(6): 2'-O-methyl
  misc_feature (7)..(7): 2'-deoxy-2'-fluoro
  misc_feature (8)..(9): 2'-O-methyl
  misc_feature (10)..(10): 2'-deoxy-2'-fluoro
  misc_feature (11)..(11): 2'-O-methyl
  misc_feature (12)..(16): 2'-deoxy-2'-fluoro
  misc_feature (17)..(18): 2'-O-methyl
  misc_feature (19)..(19): 2'-deoxy-2'-fluoro
  misc_feature (1)..(19): ribonucleotide modified as described
  misc_feature (20)..(21): internucleotide phosphorothioate linkage
gugccacaacgccuuuagctt

SEQ ID NO: 1883 - DNA, 21 bp, Artificial Sequence
  Description of Artificial Sequence: synthetic
  misc_feature (1)..(2): 2'-deoxy-2'-fluoro
  misc_feature (3)..(3): 2'-O-methyl
  misc_feature (4)..(5): 2'-deoxy-2'-fluoro
  misc_feature (6)..(6): 2'-O-methyl
  misc_feature (7)..(7): 2'-deoxy-2'-fluoro
  misc_feature (8)..(11): 2'-O-methyl
  misc_feature (12)..(15): 2'-deoxy-2'-fluoro
  misc_feature (16)..(16): 2'-O-methyl
  misc_feature (17)..(17): 2'-deoxy-2'-fluoro
  misc_feature (18)..(18): 2'-O-methyl
  misc_feature (19)..(19): 2'-deoxy-2'-fluoro
  misc_feature (1)..(19): ribonucleotide modified as described
  misc_feature (20)..(21): internucleotide phosphorothioate linkage
uuaccacagggccuuacgctt

SEQ ID NO: 1884 - DNA, 21 bp, Artificial Sequence
  Description of Artificial Sequence: synthetic
  misc_feature (1)..(3): 2'-O-methyl
  misc_feature (4)..(5): 2'-deoxy-2'-fluoro
  misc_feature (6)..(6): 2'-O-methyl
  misc_feature (7)..(8): 2'-deoxy-2'-fluoro
  misc_feature (9)..(11): 2'-O-methyl
  misc_feature (12)..(12): 2'-deoxy-2'-fluoro
  misc_feature (13)..(13): 2'-O-methyl
  misc_feature (14)..(19): 2'-deoxy-2'-fluoro
  misc_feature (1)..(19): ribonucleotide modified as described
  misc_feature (20)..(21): internucleotide phosphorothioate linkage
gaaccaccaggcguuucuctt

SEQ ID NO: 1885 - DNA, 21 bp, Artificial Sequence
  Description of Artificial Sequence: synthetic
  misc_feature (1)..(2): 2'-O-methyl
  misc_feature (3)..(3): 2'-deoxy-2'-fluoro
  misc_feature (4)..(4): 2'-O-methyl
  misc_feature (5)..(6): 2'-deoxy-2'-fluoro
  misc_feature (7)..(7): 2'-O-methyl
  misc_feature (8)..(8): 2'-deoxy-2'-fluoro
  misc_feature (9)..(10): 2'-O-methyl
  misc_feature (11)..(11): 2'-deoxy-2'-fluoro
  misc_feature (12)..(12): 2'-O-methyl
  misc_feature (13)..(16): 2'-deoxy-2'-fluoro
  misc_feature (17)..(17): 2'-O-methyl
  misc_feature (18)..(18): 2'-deoxy-2'-fluoro
  misc_feature (19)..(19): 2'-O-methyl
  misc_feature (1)..(19): ribonucleotide modified as described
  misc_feature (20)..(21): internucleotide phosphorothioate linkage
agugccacaaugccuuacgtt

SEQ ID NO: 1886 - DNA, 21 bp, Artificial Sequence
  Description of Artificial Sequence: synthetic
  misc_feature (1)..(2): 2'-O-methyl
  misc_feature (3)..(3): 2'-deoxy-2'-fluoro
  misc_feature (4)..(5): 2'-O-methyl
  misc_feature (6)..(6): 2'-deoxy-2'-fluoro
  misc_feature (7)..(7): 2'-O-methyl
  misc_feature (8)..(8): 2'-deoxy-2'-fluoro
  misc_feature (9)..(10): 2'-O-methyl
  misc_feature (11)..(11): 2'-deoxy-2'-fluoro
  misc_feature (12)..(12): 2'-O-methyl
  misc_feature (13)..(18): 2'-deoxy-2'-fluoro
  misc_feature (19)..(19): 2'-O-methyl
  misc_feature (1)..(19): ribonucleotide modified as described
  misc_feature (20)..(21): internucleotide phosphorothioate linkage
aguagcacaaugccucucgtt

SEQ ID NO: 1887 - DNA, 21 bp, Artificial Sequence
  Description of Artificial Sequence: synthetic
  misc_feature (1)..(2): 2'-O-methyl
  misc_feature (3)..(3): 2'-deoxy-2'-fluoro
  misc_feature (4)..(4): 2'-O-methyl
  misc_feature (5)..(8): 2'-deoxy-2'-fluoro
  misc_feature (9)..(12): 2'-O-methyl
  misc_feature (13)..(17): 2'-deoxy-2'-fluoro
  misc_feature (18)..(19): 2'-O-methyl
  misc_feature (1)..(19): ribonucleotide modified as described
  misc_feature (20)..(21): internucleotide phosphorothioate linkage
agcaccucaagaccuuuggtt

SEQ ID NO: 1888 - DNA, 21 bp, Artificial Sequence
  Description of Artificial Sequence: synthetic
  misc_feature (1)..(3): 2'-deoxy-2'-fluoro
  misc_feature (4)..(4): 2'-O-methyl
  misc_feature (5)..(5): 2'-deoxy-2'-fluoro
  misc_feature (6)..(8): 2'-O-methyl
  misc_feature (9)..(9): 2'-deoxy-2'-fluoro
  misc_feature (10)..(11): 2'-O-methyl
  misc_feature (12)..(14): 2'-deoxy-2'-fluoro
  misc_feature (15)..(15): 2'-O-methyl
  misc_feature (16)..(18): 2'-deoxy-2'-fluoro
  misc_feature (19)..(19): 2'-O-methyl
  misc_feature (1)..(19): ribonucleotide modified as described
  misc_feature (20)..(21): internucleotide phosphorothioate linkage
cucacaagcagccuauccgtt

SEQ ID NO: 1889 - DNA, 21 bp, Artificial Sequence
  Description of Artificial Sequence: synthetic
  misc_feature (1)..(5): 2'-deoxy-2'-fluoro
  misc_feature (6)..(8): 2'-O-methyl
  misc_feature (9)..(9): 2'-deoxy-2'-fluoro
  misc_feature (10)..(10): 2'-O-methyl
  misc_feature (11)..(14): 2'-deoxy-2'-fluoro
  misc_feature (15)..(16): 2'-O-methyl
  misc_feature (17)..(17): 2'-deoxy-2'-fluoro
  misc_feature (18)..(19): 2'-O-methyl
  misc_feature (1)..(19): ribonucleotide modified as described
  misc_feature (20)..(21): internucleotide phosphorothioate linkage
cucccaaguacccuagcagtt

SEQ ID NO: 1890 - DNA, 21 bp, Artificial Sequence
  Description of Artificial Sequence: synthetic
  misc_feature (1)..(3): 2'-deoxy-2'-fluoro
  misc_feature (4)..(4): 2'-O-methyl
  misc_feature (5)..(5): 2'-deoxy-2'-fluoro
  misc_feature (6)..(7): 2'-O-methyl
  misc_feature (8)..(9): 2'-deoxy-2'-fluoro
  misc_feature (10)..(10): 2'-O-methyl
  misc_feature (11)..(12): 2'-deoxy-2'-fluoro
  misc_feature (13)..(13): 2'-O-methyl
  misc_feature (14)..(14): 2'-deoxy-2'-fluoro
  misc_feature (15)..(15): 2'-O-methyl
  misc_feature (16)..(17): 2'-deoxy-2'-fluoro
  misc_feature (18)..(19): 2'-O-methyl
  misc_feature (1)..(19): ribonucleotide modified as described
  misc_feature (20)..(21): internucleotide phosphorothioate linkage
cccgcaaucaccauaucggtt

SEQ ID NO: 1891 - DNA, 21 bp, Artificial Sequence
  Description of Artificial Sequence: synthetic
  misc_feature (1)..(1): 2'-O-methyl
  misc_feature (2)..(2): 2'-deoxy-2'-fluoro
  misc_feature (3)..(3): 2'-O-methyl
  misc_feature (4)..(6): 2'-deoxy-2'-fluoro
  misc_feature (7)..(7): 2'-O-methyl
  misc_feature (8)..(9): 2'-deoxy-2'-fluoro
  misc_feature (10)..(11): 2'-O-methyl
  misc_feature (12)..(12): 2'-deoxy-2'-fluoro
  misc_feature (13)..(13): 2'-O-methyl
  misc_feature (14)..(16): 2'-deoxy-2'-fluoro
  misc_feature (17)..(18): 2'-O-methyl
  misc_feature (19)..(19): 2'-deoxy-2'-fluoro
  misc_feature (1)..(19): ribonucleotide modified as described
  misc_feature (20)..(21): internucleotide phosphorothioate linkage
guacucgccagcacccaautt

SEQ ID NO: 1892 - DNA, 21 bp, Artificial Sequence
  Description of Artificial Sequence: synthetic
  misc_feature (1)..(2): 2'-deoxy-2'-fluoro
  misc_feature (3)..(3): 2'-O-methyl
  misc_feature (4)..(6): 2'-deoxy-2'-fluoro
  misc_feature (7)..(7): 2'-O-methyl
  misc_feature (8)..(8): 2'-deoxy-2'-fluoro
  misc_feature (9)..(11): 2'-O-methyl
  misc_feature (12)..(12): 2'-deoxy-2'-fluoro
  misc_feature (13)..(13): 2'-O-methyl
  misc_feature (14)..(15): 2'-deoxy-2'-fluoro
  misc_feature (16)..(16): 2'-O-methyl
  misc_feature (17)..(17): 2'-deoxy-2'-fluoro
  misc_feature (18)..(18): 2'-O-methyl
  misc_feature (19)..(19): 2'-deoxy-2'-fluoro
  misc_feature (1)..(19): ribonucleotide modified as described
  misc_feature (20)..(21): internucleotide phosphorothioate linkage
ccacucgcaggcaccauautt

SEQ ID NO: 1893 - DNA, 21 bp, Artificial Sequence
  Description of Artificial Sequence: synthetic
  misc_feature (1)..(1): 2'-O-methyl
  misc_feature (2)..(2): 2'-deoxy-2'-fluoro
  misc_feature (3)..(3): 2'-O-methyl
  misc_feature (4)..(4): 2'-deoxy-2'-fluoro
  misc_feature (5)..(5): 2'-O-methyl
  misc_feature (6)..(6): 2'-deoxy-2'-fluoro
  misc_feature (7)..(7): 2'-O-methyl
  misc_feature (8)..(8): 2'-deoxy-2'-fluoro
  misc_feature (9)..(11): 2'-O-methyl
  misc_feature (12)..(12): 2'-deoxy-2'-fluoro
  misc_feature (13)..(13): 2'-O-methyl
  misc_feature (14)..(19): 2'-deoxy-2'-fluoro
  misc_feature (1)..(19): ribonucleotide modified as described
  misc_feature (20)..(21): internucleotide phosphorothioate linkage
acacgcgcaaguacccucutt

SEQ ID NO: 1894 - DNA, 21 bp, Artificial Sequence
  Description of Artificial Sequence: synthetic
  misc_feature (1)..(1): 5'-3 attached terminal deoxyabasic moiety
  misc_feature (1)..(1): 2'-deoxy-2'-fluoro
  misc_feature (2)..(2): 2'-deoxy
  misc_feature (3)..(3): 2'-deoxy-2'-fluoro
  misc_feature (4)..(5): 2'-deoxy
  misc_feature (6)..(6): 2'-deoxy-2'-fluoro
  misc_feature (7)..(7): 2'-deoxy
  misc_feature (8)..(11): 2'-deoxy-2'-fluoro
  misc_feature (12)..(17): 2'-deoxy
  misc_feature (18)..(18): 2'-deoxy-2'-fluoro
  misc_feature (19)..(19): 2'-deoxy
  misc_feature (1)..(19): ribonucleotide modified as described
  misc_feature (21)..(21): 3'-3 attached terminal deoxyabasic moiety
caugguguuccggaaagcgtt

SEQ ID NO: 1895 - DNA, 21 bp, Artificial Sequence
  Description of Artificial Sequence: synthetic
  misc_feature (1)..(1): 5'-3 attached terminal deoxyabasic moiety
  misc_feature (1)..(2): 2'-deoxy-2'-fluoro
  misc_feature (3)..(3): 2'-deoxy
  misc_feature (4)..(4): 2'-deoxy-2'-fluoro
  misc_feature (5)..(6): 2'-deoxy
  misc_feature (7)..(7): 2'-deoxy-2'-fluoro
  misc_feature (8)..(8): 2'-deoxy
  misc_feature (9)..(12): 2'-deoxy-2'-fluoro
  misc_feature (13)..(18): 2'-deoxy
  misc_feature (19)..(19): 2'-deoxy-2'-fluoro
  misc_feature (1)..(19): ribonucleotide modified as described
  misc_feature (21)..(21): 3'-3 attached terminal deoxyabasic moiety
ucaugguguuccggaaagctt

SEQ ID NO: 1896 - DNA, 21 bp, Artificial Sequence
  Description of Artificial Sequence: synthetic
  misc_feature (1)..(1): 5'-3 attached terminal deoxyabasic moiety
  misc_feature (1)..(3): 2'-deoxy
  misc_feature (4)..(4): 2'-deoxy-2'-fluoro
  misc_feature (5)..(5): 2'-deoxy
  misc_feature (6)..(8): 2'-deoxy-2'-fluoro
  misc_feature (9)..(9): 2'-deoxy
  misc_feature (10)..(10): 2'-deoxy-2'-fluoro
  misc_feature (11)..(14): 2'-deoxy
  misc_feature (15)..(15): 2'-deoxy-2'-fluoro
  misc_feature (16)..(17): 2'-deoxy
  misc_feature (18)..(19): 2'-deoxy-2'-fluoro
  misc_feature (1)..(19): ribonucleotide modified as described
  misc_feature (21)..(21): 3'-3 attached terminal deoxyabasic moiety
gagcguucgugggauaguctt

SEQ ID NO: 1897 - DNA, 21 bp, Artificial Sequence
  Description of Artificial Sequence: synthetic
  misc_feature (1)..(1): 5'-3 attached terminal deoxyabasic moiety
  misc_feature (1)..(1): 2'-deoxy-2'-fluoro
  misc_feature (2)..(2): 2'-deoxy
  misc_feature (3)..(3): 2'-deoxy-2'-fluoro
  misc_feature (4)..(6): 2'-deoxy
  misc_feature (7)..(7): 2'-deoxy-2'-fluoro
  misc_feature (8)..(8): 2'-deoxy
  misc_feature (9)..(11): 2'-deoxy-2'-fluoro
  misc_feature (12)..(12): 2'-deoxy
  misc_feature (13)..(13): 2'-deoxy-2'-fluoro
  misc_feature (14)..(17): 2'-deoxy
  misc_feature (18)..(18): 2'-deoxy-2'-fluoro
  misc_feature (19)..(19): 2'-deoxy
  misc_feature (1)..(19): ribonucleotide modified as described
  misc_feature (21)..(21): 3'-3 attached terminal deoxyabasic moiety
cgugagcguucgugggauatt

SEQ ID NO: 1898 - DNA, 21 bp, Artificial Sequence
  Description of Artificial Sequence: synthetic
  misc_feature (1)..(1): 2'-deoxy-2'-fluoro
  misc_feature (2)..(2): 2'-O-methyl
  misc_feature (3)..(8): 2'-deoxy-2'-fluoro
  misc_feature (9)..(12): 2'-O-methyl
  misc_feature (13)..(13): 2'-deoxy-2'-fluoro
  misc_feature (14)..(14): 2'-O-methyl
  misc_feature (15)..(16): 2'-deoxy-2'-fluoro
  misc_feature (17)..(17): 2'-O-methyl
  misc_feature (18)..(18): 2'-deoxy-2'-fluoro
  misc_feature (19)..(19): 2'-O-methyl
  misc_feature (1)..(19): ribonucleotide modified as described
  misc_feature (20)..(21): internucleotide phosphorothioate linkage
cgcuuuccggaacaccaugtt

SEQ ID NO: 1899 - DNA, 21 bp, Artificial Sequence
  Description of Artificial Sequence: synthetic
  misc_feature (1)..(1): 2'-O-methyl
  misc_feature (2)..(7): 2'-deoxy-2'-fluoro
  misc_feature (8)..(11): 2'-O-methyl
  misc_feature (12)..(12): 2'-deoxy-2'-fluoro
  misc_feature (13)..(13): 2'-O-methyl
  misc_feature (14)..(15): 2'-deoxy-2'-fluoro
  misc_feature (16)..(16): 2'-O-methyl
  misc_feature (17)..(17): 2'-deoxy-2'-fluoro
  misc_feature (18)..(19): 2'-O-methyl
  misc_feature (1)..(19): ribonucleotide modified as described
  misc_feature (20)..(21): internucleotide phosphorothioate linkage
gcuuuccggaacaccaugatt

SEQ ID NO: 1900 - DNA, 21 bp, Artificial Sequence
  Description of Artificial Sequence: synthetic
  misc_feature (1)..(2): 2'-O-methyl
  misc_feature (3)..(4): 2'-deoxy-2'-fluoro
  misc_feature (5)..(5): 2'-O-methyl
  misc_feature (6)..(9): 2'-deoxy-2'-fluoro
  misc_feature (10)..(10): 2'-O-methyl
  misc_feature (11)..(11): 2'-deoxy-2'-fluoro
  misc_feature (12)..(14): 2'-O-methyl
  misc_feature (15)..(15): 2'-deoxy-2'-fluoro
  misc_feature (16)..(16): 2'-O-methyl
  misc_feature (17)..(19): 2'-deoxy-2'-fluoro
  misc_feature (1)..(19): ribonucleotide modified as described
  misc_feature (20)..(21): internucleotide phosphorothioate linkage
gacuaucccacgaacgcuctt

SEQ ID NO: 1901 - DNA, 21 bp, Artificial Sequence
  Description of Artificial Sequence: synthetic
  misc_feature (1)..(1): 2'-deoxy-2'-fluoro
  misc_feature (2)..(2): 2'-O-methyl
  misc_feature (3)..(6): 2'-deoxy-2'-fluoro
  misc_feature (7)..(7): 2'-O-methyl
  misc_feature (8)..(8): 2'-deoxy-2'-fluoro
  misc_feature (9)..(11): 2'-O-methyl
  misc_feature (12)..(12): 2'-deoxy-2'-fluoro
  misc_feature (13)..(13): 2'-O-methyl
  misc_feature (14)..(16): 2'-deoxy-2'-fluoro
  misc_feature (17)..(17): 2'-O-methyl
  misc_feature (18)..(18): 2'-deoxy-2'-fluoro
  misc_feature (19)..(19): 2'-O-methyl
  misc_feature (1)..(19): ribonucleotide modified as described
  misc_feature (20)..(21): internucleotide phosphorothioate linkage
uaucccacgaacgcucacgtt

SEQ ID NO: 1902 - RNA, 28 nt, Artificial Sequence
  Description of Artificial Sequence: siNA palindrome
  misc_feature (1)..(1): terminal phosphate group
  misc_feature (28)..(28): 3'-3 attached terminal deoxyabasic moiety
ucauacuaacgccauggcguuaguauga

SEQ ID NO: 1903 - RNA, 26 nt, Artificial Sequence
  Description of Artificial Sequence: siNA palindrome
  misc_feature (1)..(1): terminal phosphate group
  misc_feature (26)..(26): 3'-3 attached terminal deoxyabasic moiety
cauacuaacgccauggcguuaguaug

SEQ ID NO: 1904 - RNA, 24 nt, Artificial Sequence
  Description of Artificial Sequence: siNA palindrome
  misc_feature (1)..(1): terminal phosphate group
  misc_feature (24)..(24): 3'-3 attached terminal deoxyabasic moiety
auacuaacgccauggcguuaguau

SEQ ID NO: 1905 - RNA, 22 nt, Artificial Sequence
  Description of Artificial Sequence: siNA palindrome
  misc_feature (1)..(1): terminal phosphate group
  misc_feature (22)..(22): 3'-3 attached terminal deoxyabasic moiety
uacuaacgccauggcguuagua

SEQ ID NO: 1906 - RNA, 28 nt, Artificial Sequence
  Description of Artificial Sequence: siNA palindrome
  misc_feature (1)..(1): terminal phosphate group
  misc_feature (28)..(28): 3'-3 attached terminal deoxyabasic moiety
acuauggcucucccgggagagccauagu

SEQ ID NO: 1907 - RNA, 26 nt, Artificial Sequence
  Description of Artificial Sequence: siNA palindrome
  misc_feature (1)..(1): terminal phosphate group
  misc_feature (26)..(26): 3'-3 attached terminal deoxyabasic moiety
cuauggcucucccgggagagccauag

SEQ ID NO: 1908 - RNA, 24 nt, Artificial Sequence
  Description of Artificial Sequence: siNA palindrome
  misc_feature (1)..(1): terminal phosphate group
  misc_feature (24)..(24): 3'-3 attached terminal deoxyabasic moiety
uauggcucucccgggagagccaua

SEQ ID NO: 1909 - RNA, 22 nt, Artificial Sequence
  Description of Artificial Sequence: siNA palindrome
  misc_feature (1)..(1): terminal phosphate group
  misc_feature (22)..(22): 3'-3 attached terminal deoxyabasic moiety
auggcucucccgggagagccau

SEQ ID NO: 1910 - RNA, 20 nt, Artificial Sequence
  Description of Artificial Sequence: siNA palindrome
  misc_feature (1)..(1): terminal phosphate group
  misc_feature (20)..(20): 3'-3 attached terminal deoxyabasic moiety
uggcucucccgggagagcca

SEQ ID NO: 1911 - RNA, 28 nt, Artificial Sequence
  Description of Artificial Sequence: siNA palindrome
  misc_feature (1)..(1): terminal phosphate group
  misc_feature (28)..(28): 3'-3 attached terminal deoxyabasic moiety
ccgguguacucaccggugaguacaccgg

SEQ ID NO: 1912 - RNA, 26 nt, Artificial Sequence
  Description of Artificial Sequence: siNA palindrome
  misc_feature (1)..(1): terminal phosphate group
  misc_feature (26)..(26): 3'-3 attached terminal deoxyabasic moiety
cgguguacucaccggugaguacaccg

SEQ ID NO: 1913 - RNA, 24 nt, Artificial Sequence
  Description of Artificial Sequence: siNA palindrome
  misc_feature (1)..(1): terminal phosphate group
  misc_feature (24)..(24): 3'-3 attached terminal deoxyabasic moiety
gguguacucaccggugaguacacc

SEQ ID NO: 1914 - RNA, 28 nt, Artificial Sequence
  Description of Artificial Sequence: siNA palindrome
  misc_feature (1)..(1): terminal phosphate group
  misc_feature (28)..(28): 3'-3 attached terminal deoxyabasic moiety
cuacgagaccucccgggaggucucguag

SEQ ID NO: 1915 - RNA, 26 nt, Artificial Sequence
  Description of Artificial Sequence: siNA palindrome
  misc_feature (1)..(1): terminal phosphate group
  misc_feature (26)..(26): 3'-3 attached terminal deoxyabasic moiety
uacgagaccucccgggaggucucgua

SEQ ID NO: 1916 - RNA, 24 nt, Artificial Sequence
  Description of Artificial Sequence: siNA palindrome
  misc_feature (1)..(1): terminal phosphate group
  misc_feature (24)..(24): 3'-3 attached terminal deoxyabasic moiety
acgagaccucccgggaggucucgu

SEQ ID NO: 1917 - DNA, 21 bp, Artificial Sequence
  Description of Artificial Sequence: synthetic
  misc_feature (3)..(5): 2'-deoxy-2'-fluoro
  misc_feature (7)..(7): 2'-deoxy-2'-fluoro
  misc_feature (12)..(17): 2'-deoxy-2'-fluoro
  misc_feature (1)..(19): ribonucleotide modified as described
  misc_feature (21)..(21): 3'-3 attached terminal deoxyabasic moiety
ggucuacgagaccucccggtt

SEQ ID NO: 1918 - DNA, 21 bp, Artificial Sequence
  Description of Artificial Sequence: synthetic
  misc_feature (3)..(8): 2'-deoxy-2'-fluoro
  misc_feature (13)..(13): 2'-deoxy-2'-fluoro
  misc_feature (15)..(17): 2'-deoxy-2'-fluoro
  misc_feature (1)..(19): ribonucleotide modified as described
  misc_feature (21)..(21): 3'-3 attached terminal deoxyabasic moiety
ggcccuccagagcaucuggtt

SEQ ID NO: 1919 - DNA, 21 bp, Artificial Sequence
  Description of Artificial Sequence: synthetic
  misc_feature (1)..(3): 2'-deoxy-2'-fluoro
  misc_feature (5)..(5): 2'-deoxy-2'-fluoro
  misc_feature (9)..(9): 2'-deoxy-2'-fluoro
  misc_feature (11)..(14): 2'-deoxy-2'-fluoro
  misc_feature (16)..(17): 2'-deoxy-2'-fluoro
  misc_feature (1)..(19): ribonucleotide modified as described
  misc_feature (21)..(21): 3'-3 attached terminal deoxyabasic moiety
cucgcaagcacccuaucagtt

SEQ ID NO: 1920 - DNA, 21 bp, Artificial Sequence
  Description of Artificial Sequence: synthetic
  misc_feature (3)..(4): 2'-deoxy-2'-fluoro
  misc_feature (6)..(9): 2'-deoxy-2'-fluoro
  misc_feature (11)..(11): 2'-deoxy-2'-fluoro
  misc_feature (15)..(15): 2'-deoxy-2'-fluoro
  misc_feature (17)..(19): 2'-deoxy-2'-fluoro
  misc_feature (1)..(19): ribonucleotide modified as described
  misc_feature (21)..(21): 3'-3 attached terminal deoxyabasic moiety
gacuaucccacgaacgcuctt

SEQ ID NO: 1921 - DNA, 21 bp, Artificial Sequence
  Description of Artificial Sequence: synthetic
  misc_feature (1)..(19): ribonucleotide modified as described
gcgaaaggccuugugguactt

SEQ ID NO: 1922 - DNA, 21 bp, Artificial Sequence
  Description of Artificial Sequence: synthetic
  misc_feature (1)..(19): ribonucleotide modified as described
cgaaaggccuugugguacutt

SEQ ID NO: 1923 - DNA, 21 bp, Artificial Sequence
  Description of Artificial Sequence: synthetic
  misc_feature (1)..(19): ribonucleotide modified as described
cugauagggugcuugcgagtt

SEQ ID NO: 1924 - DNA, 21 bp, Artificial Sequence
  Description of Artificial Sequence: synthetic
  misc_feature (1)..(19): ribonucleotide modified as described
auagggugcuugcgagugctt

SEQ ID NO: 1925 - DNA, 21 bp, Artificial Sequence
  Description of Artificial Sequence: synthetic
  misc_feature (1)..(19): ribonucleotide modified as described
ccgggaggucucguagacctt

SEQ ID NO: 1926 - DNA, 21 bp, Artificial Sequence
  Description of Artificial Sequence: synthetic
  misc_feature (1)..(19): ribonucleotide modified as described
guaccacaaggccuuucgctt

SEQ ID NO: 1927 - DNA, 21 bp, Artificial Sequence
  Description of Artificial Sequence: synthetic
  misc_feature (1)..(19): ribonucleotide modified as described
aguaccacaaggccuuucgtt

SEQ ID NO: 1928 - DNA, 21 bp, Artificial Sequence
  Description of Artificial Sequence: synthetic
  misc_feature (1)..(19): ribonucleotide modified as described
cucgcaagcacccuaucagtt

SEQ ID NO: 1929 - DNA, 21 bp, Artificial Sequence
  Description of Artificial Sequence: synthetic
  misc_feature (1)..(19): ribonucleotide modified as described
gcacucgcaagcacccuautt

SEQ ID NO: 1930 - DNA, 21 bp, Artificial Sequence
  Description of Artificial Sequence: synthetic
  misc_feature (1)..(19): ribonucleotide modified as described
caugguguuccggaaagcgtt

SEQ ID NO: 1931 - DNA, 21 bp, Artificial Sequence
  Description of Artificial Sequence: synthetic
  misc_feature (1)..(19): ribonucleotide modified as described
ucaugguguuccggaaagctt

SEQ ID NO: 1932 - DNA, 21 bp, Artificial Sequence
  Description of Artificial Sequence: synthetic
  misc_feature (1)..(19): ribonucleotide modified as described
gagcguucgugggauaguctt

SEQ ID NO: 1933 - DNA, 21 bp, Artificial Sequence
  Description of Artificial Sequence: synthetic
  misc_feature (1)..(19): ribonucleotide modified as described
cgugagcguucgugggauatt

SEQ ID NO: 1934 - DNA, 21 bp, Artificial Sequence
  Description of Artificial Sequence: synthetic
  misc_feature (1)..(19): ribonucleotide modified as described
ccagaugcucuggagggcctt

SEQ ID NO: 1935 - DNA, 21 bp, Artificial Sequence
  Description of Artificial Sequence: synthetic
  misc_feature (1)..(19): ribonucleotide modified as described
cgcuuuccggaacaccaugtt

SEQ ID NO: 1936 - DNA, 21 bp, Artificial Sequence
  Description of Artificial Sequence: synthetic
  misc_feature (1)..(19): ribonucleotide modified as described
gcuuuccggaacaccaugatt

SEQ ID NO: 1937 - DNA, 21 bp, Artificial Sequence
  Description of Artificial Sequence: synthetic
  misc_feature (1)..(19): ribonucleotide modified as described
gacuaucccacgaacgcuctt

SEQ ID NO: 1938 - DNA, 21 bp, Artificial Sequence
  Description of Artificial Sequence: synthetic
  misc_feature (1)..(19): ribonucleotide modified as described
uaucccacgaacgcucacgtt

SEQ ID NO: 1939 - DNA, 21 bp, Artificial Sequence
  Description of Artificial Sequence: synthetic
  misc_feature (1)..(19): ribonucleotide modified as described
ggcccuccagagcaucuggtt

SEQ ID NO: 1940 - DNA, 21 bp, Artificial Sequence
  Description of Artificial Sequence: synthetic
  misc_feature (1)..(1): 5'-3 attached terminal deoxyabasic moiety
  misc_feature (1)..(2): 2'-deoxy-2'-fluoro
  misc_feature (9)..(12): 2'-deoxy-2'-fluoro
  misc_feature (1)..(19): ribonucleotide modified as described
  misc_feature (21)..(21): 3'-3 attached terminal deoxyabasic moiety
ccgggaggucucguagacctt

SEQ ID NO: 1941 - DNA, 21 bp, Artificial Sequence
  Description of Artificial Sequence: synthetic
  misc_feature (1)..(2): 2'-O-methyl
  misc_feature (6)..(6): 2'-O-methyl
  misc_feature (7)..(7): 2'-deoxy-2'-fluoro
  misc_feature (8)..(11): 2'-O-methyl
  misc_feature (12)..(17): 2'-deoxy-2'-fluoro
  misc_feature (18)..(19): 2'-O-methyl
  misc_feature (1)..(19): ribonucleotide modified as described
  misc_feature (20)..(21): internucleotide phosphorothioate linkage
ggucuacgagaccucccggtt

SEQ ID NO: 1942 - DNA, 21 bp, Artificial Sequence
  Description of Artificial Sequence: synthetic
  misc_feature (1)..(2): 2'-O-methyl
  misc_feature (4)..(5): 2'-deoxy-2'-fluoro
  misc_feature (6)..(6): 2'-O-methyl
  misc_feature (7)..(7): 2'-deoxy-2'-fluoro
  misc_feature (8)..(11): 2'-O-methyl
  misc_feature (12)..(17): 2'-deoxy-2'-fluoro
  misc_feature (18)..(19): 2'-O-methyl
  misc_feature (1)..(19): ribonucleotide modified as described
  misc_feature (20)..(21): internucleotide phosphorothioate linkage
ggucuacgagaccucccggtt

SEQ ID NO: 1943 - DNA, 21 bp, Artificial Sequence
  Description of Artificial Sequence: synthetic
  misc_feature (1)..(2): 2'-O-methyl
  misc_feature (3)..(5): 2'-deoxy-2'-fluoro
  misc_feature (6)..(6): 2'-O-methyl
  misc_feature (7)..(7): 2'-deoxy-2'-fluoro
  misc_feature (8)..(11): 2'-O-methyl
  misc_feature (12)..(17): 2'-deoxy-2'-fluoro
  misc_feature (18)..(19): 2'-O-methyl
  misc_feature (1)..(19): ribonucleotide modified as described
  misc_feature (20)..(21): internucleotide phosphorothioate linkage
ggucuacgagaccucccggtt

SEQ ID NO: 1944 - DNA, 21 bp, Artificial Sequence
  Description of Artificial Sequence: synthetic
  misc_feature (1)..(2): 2'-O-methyl
  misc_feature (3)..(5): 2'-deoxy-2'-fluoro
  misc_feature (6)..(6): 2'-O-methyl
  misc_feature (7)..(7): 2'-deoxy-2'-fluoro
  misc_feature (8)..(11): 2'-O-methyl
  misc_feature (12)..(17): 2'-deoxy-2'-fluoro
  misc_feature (18)..(19): 2'-O-methyl
  misc_feature (1)..(19): ribonucleotide modified as described
  misc_feature (20)..(21): internucleotide phosphorothioate linkage
ggucuacgagaccucccggtt

SEQ ID NO: 1945 - DNA, 21 bp, Artificial Sequence
  Description of Artificial Sequence: synthetic
  misc_feature (1)..(1): 5'-3 attached terminal deoxyabasic moiety
  misc_feature (1)..(2): 2'-deoxy-2'-fluoro
  misc_feature (3)..(4): 2'-deoxy
  misc_feature (5)..(5): 2'-deoxy-2'-fluoro
  misc_feature (6)..(9): 2'-deoxy
  misc_feature (10)..(10): 2'-deoxy-2'-fluoro
  misc_feature (11)..(11): 2'-deoxy
  misc_feature (12)..(13): 2'-deoxy-2'-fluoro
  misc_feature (15)..(15): 2'-deoxy
  misc_feature (17)..(19): 2'-deoxy
  misc_feature (1)..(19): ribonucleotide modified as described
  misc_feature (21)..(21): 3'-3 attached terminal deoxyabasic moiety
cugauagggugcuugcgagtt

SEQ ID NO: 1946 - DNA, 21 bp, Artificial Sequence
  Description of Artificial Sequence: synthetic
  misc_feature (4)..(4): 2'-O-methyl
  misc_feature (6)..(8): 2'-O-methyl
  misc_feature (9)..(9): 2'-deoxy-2'-fluoro
  misc_feature (10)..(10): 2'-O-methyl
  misc_feature (11)..(14): 2'-deoxy-2'-fluoro
  misc_feature (15)..(15): 2'-O-methyl
  misc_feature (16)..(17): 2'-deoxy-2'-fluoro
  misc_feature (18)..(19): 2'-O-methyl
  misc_feature (1)..(19): ribonucleotide modified as described
  misc_feature (20)..(21): internucleotide phosphorothioate linkage
cucgcaagcacccuaucagtt

SEQ ID NO: 1947 - DNA, 21 bp, Artificial Sequence
  Description of Artificial Sequence: synthetic
  misc_feature (4)..(4): 2'-O-methyl
  misc_feature (5)..(5): 2'-deoxy-2'-fluoro
  misc_feature (6)..(8): 2'-O-methyl
  misc_feature (9)..(9): 2'-deoxy-2'-fluoro
  misc_feature (10)..(10): 2'-O-methyl
  misc_feature (11)..(14): 2'-deoxy-2'-fluoro
  misc_feature (15)..(15): 2'-O-methyl
  misc_feature (16)..(17): 2'-deoxy-2'-fluoro
  misc_feature (18)..(19): 2'-O-methyl
  misc_feature (1)..(19): ribonucleotide modified as described
  misc_feature (20)..(21): internucleotide phosphorothioate linkage
cucgcaagcacccuaucagtt

SEQ ID NO: 1948 - DNA, 21 bp, Artificial Sequence
  Description of Artificial Sequence: synthetic
  misc_feature (3)..(3): 2'-deoxy-2'-fluoro
  misc_feature (4)..(4): 2'-O-methyl
  misc_feature (5)..(5): 2'-deoxy-2'-fluoro
  misc_feature (6)..(8): 2'-O-methyl
  misc_feature (9)..(9): 2'-deoxy-2'-fluoro
  misc_feature (10)..(10): 2'-O-methyl
  misc_feature (11)..(14): 2'-deoxy-2'-fluoro
  misc_feature (15)..(15): 2'-O-methyl
  misc_feature (16)..(17): 2'-deoxy-2'-fluoro
  misc_feature (18)..(19): 2'-O-methyl
  misc_feature (1)..(19): ribonucleotide modified as described
  misc_feature (20)..(21): internucleotide phosphorothioate linkage
cucgcaagcacccuaucagtt

SEQ ID NO: 1949 - DNA, 21 bp, Artificial Sequence
  Description of Artificial Sequence: synthetic
  misc_feature (2)..(3): 2'-deoxy-2'-fluoro
  misc_feature (4)..(4): 2'-O-methyl
  misc_feature (5)..(5): 2'-deoxy-2'-fluoro
  misc_feature (6)..(8): 2'-O-methyl
  misc_feature (9)..(9): 2'-deoxy-2'-fluoro
  misc_feature (10)..(10): 2'-O-methyl
  misc_feature (11)..(14): 2'-deoxy-2'-fluoro
  misc_feature (15)..(15): 2'-O-methyl
  misc_feature (16)..(17): 2'-deoxy-2'-fluoro
  misc_feature (18)..(19): 2'-O-methyl
  misc_feature (1)..(19): ribonucleotide modified as described
  misc_feature (20)..(21): internucleotide phosphorothioate linkage
cucgcaagcacccuaucagtt

SEQ ID NO: 1950 - RNA, 38 nt, Artificial Sequence
  Description of Artificial Sequence: siNA palindrome
ggucuacgagaccucccggccgggaggucucguagacc

SEQ ID NO: 1951 - DNA, 40 bp, Artificial Sequence
  Description of Artificial Sequence: siNA palindrome
  misc_feature (1)..(38): ribonucleotide modified as described
ggucuacgagaccucccggccgggaggucucguagacctt

SEQ ID NO: 1952 - RNA, 36 nt, Artificial Sequence
  Description of Artificial Sequence: siNA palindrome
ggucuacgagaccucccgcgggaggucucguagacc

SEQ ID NO: 1953 - DNA, 38 bp, Artificial Sequence
  Description of Artificial Sequence: siNA palindrome
  misc_feature (1)..(36): ribonucleotide modified as described
ggucuacgagaccucccgcgggaggucucguagacctt

SEQ ID NO: 1954 - RNA, 34 nt, Artificial Sequence
  Description of Artificial Sequence: siNA palindrome
ggucuacgagaccucccgggaggucucguagacc

SEQ ID NO: 1955 - DNA, 36 bp, Artificial Sequence
  Description of Artificial Sequence: siNA palindrome
  misc_feature (1)..(34): ribonucleotide modified as described
ggucuacgagaccucccgggaggucucguagacctt

SEQ ID NO: 1956 - RNA, 32 nt, Artificial Sequence
  Description of Artificial Sequence: siNA palindrome
ggucuacgagaccuccggaggucucguagacc

SEQ ID NO: 1957 - DNA, 34 bp, Artificial Sequence
  Description of Artificial Sequence: siNA palindrome
  misc_feature (1)..(32): ribonucleotide modified as described
ggucuacgagaccuccggaggucucguagacctt

SEQ ID NO: 1958 - RNA, 32 nt, Artificial Sequence
  Description of Artificial Sequence: siNA palindrome
gucuacgagaccucccgggaggucucguagac

SEQ ID NO: 1959 - DNA, 34 bp, Artificial Sequence
  Description of Artificial Sequence: siNA palindrome
  misc_feature (1)..(32): ribonucleotide modified as described
gucuacgagaccucccgggaggucucguagactt

SEQ ID NO: 1960 - RNA, 30 nt, Artificial Sequence
  Description of Artificial Sequence: siNA palindrome
ucuacgagaccucccgggaggucucguaga

SEQ ID NO: 1961 - DNA, 32 bp, Artificial Sequence
  Description of Artificial Sequence: siNA palindrome
  misc_feature (1)..(30): ribonucleotide modified as described
ucuacgagaccucccgggaggucucguagatt

SEQ ID NO: 1962 - RNA, 28 nt, Artificial Sequence
  Description of Artificial Sequence: siNA palindrome
cuacgagaccucccgggaggucucguag

SEQ ID NO: 1963 - DNA, 30 bp, Artificial Sequence
  Description of Artificial Sequence: siNA palindrome
  misc_feature (1)..(28): ribonucleotide modified as described
cuacgagaccucccgggaggucucguagtt

SEQ ID NO: 1964 - RNA, 30 nt, Artificial Sequence
  Description of Artificial Sequence: siNA palindrome
ggucuacgagaccuccaggucucguagacc

SEQ ID NO: 1965 - DNA, 32 bp, Artificial Sequence
  Description of Artificial Sequence: siNA palindrome
  misc_feature (1)..(30): ribonucleotide modified as described
ggucuacgagaccuccaggucucguagacctt

SEQ ID NO: 1966 - RNA, 30 nt, Artificial Sequence
  Description of Artificial Sequence: siNA palindrome
ggucuacgagaccucgaggucucguagacc

SEQ ID NO: 1967 - DNA, 32 bp, Artificial Sequence
  Description of Artificial Sequence: siNA palindrome
  misc_feature (1)..(30): ribonucleotide modified as described
ggucuacgagaccucgaggucucguagacctt

SEQ ID NO: 1968 - RNA, 30 nt, Artificial Sequence
  Description of Artificial Sequence: siNA palindrome
ggucuacgagaccugcaggucucguagacc

SEQ ID NO: 1969 - DNA, 32 bp, Artificial Sequence
  Description of Artificial Sequence: siNA palindrome
  misc_feature (1)..(30): ribonucleotide modified as described
ggucuacgagaccugcaggucucguagacctt

SEQ ID NO: 1970 - DNA, 40 bp, Artificial Sequence
  Description of Artificial Sequence: siNA palindrome
  misc_feature (1)..(38): ribonucleotide modified as described
gacuaucccacgaacgcucgagcguucgugggauaguctt

SEQ ID NO: 1971 - RNA, 38 nt, Artificial Sequence
  Description of Artificial Sequence: siNA palindrome
gacuaucccacgaacgcucgagcguucgugggauaguc

SEQ ID NO: 1972 - DNA, 34 bp, Artificial Sequence
  Description of Artificial Sequence: siNA palindrome
  misc_feature (1)..(32): ribonucleotide modified as described
gacuaucccacgaacgcguucgugggauaguctt

SEQ ID NO: 1973 - RNA, 32 nt, Artificial Sequence
  Description of Artificial Sequence: siNA palindrome
gacuaucccacgaacgcguucgugggauaguc

SEQ ID NO: 1974 - DNA, 32 bp, Artificial Sequence
  Description of Artificial Sequence: siNA palindrome
  misc_feature (1)..(30): ribonucleotide modified as described
gacuaucccacgaacguucgugggauaguctt

SEQ ID NO: 1975 - RNA, 30 nt, Artificial Sequence
  Description of Artificial Sequence: siNA palindrome
gacuaucccacgaacguucgugggauaguc

SEQ ID NO: 1976 - DNA, 30 bp, Artificial Sequence
  Description of Artificial Sequence: siNA palindrome
  misc_feature (1)..(28): ribonucleotide modified as described
acuaucccacgaacguucgugggauagutt

SEQ ID NO: 1977 - RNA, 24 nt, Artificial Sequence
  Description of Artificial Sequence: siNA palindrome
acuaucccacgaacguucguggga

SEQ ID NO: 1978 - DNA, 42 bp, Artificial Sequence
  Description of Artificial Sequence: synthetic
  misc_feature (1)..(19): ribonucleotide modified as described
  misc_feature (21)..(22): internucleotide hexethelyne glycol
  misc_feature (22)..(40): ribonucleotide modified as described
ccgggaggucucguagaccttgcgaaaggccuugugguactt

SEQ ID NO: 1979 - DNA, 42 bp, Artificial Sequence
  Description of Artificial Sequence: synthetic
  misc_feature (1)..(19): ribonucleotide modified as described
  misc_feature (21)..(22): internucleotide hexethelyne glycol
  misc_feature (22)..(40): ribonucleotide modified as described
ccgggaggucucguagaccttauagggugcuugcgagugctt

SEQ ID NO: 1980 - DNA, 42 bp, Artificial Sequence
  Description of Artificial Sequence: synthetic
  misc_feature (1)..(19): ribonucleotide modified as described
  misc_feature (21)..(22): internucleotide hexethelyne glycol
  misc_feature (22)..(40): ribonucleotide modified as described
auagggugcuugcgagugcttgcgaaaggccuugugguactt

SEQ ID NO: 1981 - DNA, 21 bp, Artificial Sequence
  Description of Artificial Sequence: synthetic
  misc_feature (1)..(1): 5'-3 attached terminal deoxyabasic moiety
  misc_feature (1)..(19): ribonucleotide modified as described
  misc_feature (21)..(21): 3'-3 attached terminal deoxyabasic moiety
cugauagggugcuugcgagtt

SEQ ID NO: 1982 - DNA, 21 bp, Artificial Sequence
  Description of Artificial Sequence: synthetic
  misc_feature (1)..(19): ribonucleotide modified as described
  misc_feature (20)..(21): internucleotide phosphorothioate linkage
cucgcaagcacccuaucagtt

SEQ ID NO: 1983 - DNA, 21 bp, Artificial Sequence
  Description of Artificial Sequence: synthetic
  misc_feature (1)..(1): 5'-3 attached terminal deoxyabasic moiety
  misc_feature (1)..(2): 2'-deoxy-2'-fluoro
  misc_feature (5)..(5): 2'-deoxy-2'-fluoro
  misc_feature (10)..(10): 2'-deoxy-2'-fluoro
  misc_feature (12)..(14): 2'-deoxy-2'-fluoro
  misc_feature (16)..(16): 2'-deoxy-2'-fluoro
  misc_feature (1)..(19): ribonucleotide modified as described
  misc_feature (21)..(21): 3'-3 attached terminal deoxyabasic moiety
cugauagggugcuugcgagtt

SEQ ID NO: 1984 - DNA, 21 bp, Artificial Sequence
  Description of Artificial Sequence: synthetic
  misc_feature (1)..(3): 2'-deoxy-2'-fluoro
  misc_feature (5)..(5): 2'-deoxy-2'-fluoro
  misc_feature (9)..(9): 2'-deoxy-2'-fluoro
  misc_feature (11)..(14): 2'-deoxy-2'-fluoro
  misc_feature (16)..(17): 2'-deoxy-2'-fluoro
  misc_feature (1)..(19): ribonucleotide modified as described
  misc_feature (20)..(21): internucleotide phosphorothioate linkage
cucgcaagcacccuaucagtt

SEQ ID NO: 1985 - DNA, 42 bp, Artificial Sequence; identical to SEQ ID NO: 1979
  Description of Artificial Sequence: synthetic
  misc_feature (1)..(1): 5'-3 attached terminal deoxyabasic moiety
  misc_feature (1)..(2): 2'-deoxy-2'-fluoro
  misc_feature (3)..(8): 2'-deoxy
  misc_feature (9)..(12): 2'-deoxy-2'-fluoro
  misc_feature (13)..(13): 2'-deoxy
  misc_feature (14)..(14): 2'-deoxy-2'-fluoro
  misc_feature (15)..(17): 2'-deoxy
  misc_feature (18)..(19): 2'-deoxy-2'-fluoro
  misc_feature (1)..(19): ribonucleotide modified as described
  misc_feature (21)..(22): internucleotide hexethelyne glycol
  misc_feature (23)..(23): 2'-deoxy-2'-fluoro
  misc_feature (29)..(29): 2'-deoxy-2'-fluoro
  misc_feature (31)..(33): 2'-deoxy-2'-fluoro
  misc_feature (35)..(35): 2'-deoxy-2'-fluoro
  misc_feature (39)..(39): 2'-deoxy-2'-fluoro
  misc_feature (22)..(40): ribonucleotide modified as described
  misc_feature (41)..(41): 2'-deoxy-2'-fluoro
  misc_feature (42)..(42): 3'-3 attached terminal deoxyabasic moiety

SEQ ID NO: 1986 - DNA, 21 bp, Artificial Sequence
  Description of Artificial Sequence: synthetic
  misc_feature (1)..(1): 2'-O-methyl
  misc_feature (3)..(3): 2'-O-methyl
  misc_feature (4)..(6): 2'-deoxy-2'-fluoro
  misc_feature (7)..(7): 2'-O-methyl
  misc_feature (8)..(8): 2'-deoxy-2'-fluoro
  misc_feature (9)..(11): 2'-O-methyl
  misc_feature (12)..(12): 2'-deoxy-2'-fluoro
  misc_feature (13)..(13): 2'-O-methyl
  misc_feature (14)..(17): 2'-deoxy-2'-fluoro
  misc_feature (18)..(18): 2'-O-methyl
  misc_feature (19)..(19): 2'-deoxy-2'-fluoro
  misc_feature (1)..(19): ribonucleotide modified as described
gcacucgcaagcacccuautt

SEQ ID NO: 1987 - DNA, 21 bp, Artificial Sequence
  Description of Artificial Sequence: synthetic
  misc_feature (1)..(2): 2'-O-methyl
  misc_feature (4)..(5): 2'-deoxy-2'-fluoro
  misc_feature (6)..(6): 2'-O-methyl
  misc_feature (7)..(7): 2'-deoxy-2'-fluoro
  misc_feature (8)..(11): 2'-O-methyl
  misc_feature (12)..(17): 2'-deoxy-2'-fluoro
  misc_feature (18)..(19): 2'-O-methyl
  misc_feature (1)..(19): ribonucleotide modified as described
ggucuacgagaccucccggtt

SEQ ID NO: 1988 - DNA, 21 bp, Artificial Sequence
  Description of Artificial Sequence: synthetic
  misc_feature (1)..(1): 2'-O-methyl
  misc_feature (3)..(3): 2'-O-methyl
  misc_feature (4)..(5): 2'-deoxy-2'-fluoro
  misc_feature (6)..(6): 2'-O-methyl
  misc_feature (7)..(7): 2'-deoxy-2'-fluoro
  misc_feature (8)..(11): 2'-O-methyl
  misc_feature (12)..(17): 2'-deoxy-2'-fluoro
  misc_feature (18)..(18): 2'-O-methyl
  misc_feature (19)..(19): 2'-deoxy-2'-fluoro
  misc_feature (1)..(19): ribonucleotide modified as described
  misc_feature (20)..(21): internucleotide phosphorothioate linkage
guaccacaaggccuuucgctt

SEQ ID NO: 1989 - DNA, 21 bp, Artificial Sequence
  Description of Artificial Sequence: synthetic
  misc_feature (1)..(2): 2'-O-methyl
  misc_feature (4)..(4): 2'-O-methyl
  misc_feature (5)..(6): 2'-deoxy-2'-fluoro
  misc_feature (7)..(7): 2'-O-methyl
  misc_feature (8)..(8): 2'-deoxy-2'-fluoro
  misc_feature (9)..(12): 2'-O-methyl
  misc_feature (13)..(18): 2'-deoxy-2'-fluoro
  misc_feature (19)..(19): 2'-O-methyl
  misc_feature (1)..(19): ribonucleotide modified as described
  misc_feature (20)..(21): internucleotide phosphorothioate linkage
aguaccacaaggccuuucgtt

SEQ ID NO: 1990 - DNA, 21 bp, Artificial Sequence
  Description of Artificial Sequence: synthetic
  misc_feature (1)..(1): 2'-O-methyl
  misc_feature (3)..(3): 2'-O-methyl
  misc_feature (4)..(6): 2'-deoxy-2'-fluoro
  misc_feature (7)..(7): 2'-O-methyl
  misc_feature (8)..(8): 2'-deoxy-2'-fluoro
  misc_feature (9)..(11): 2'-O-methyl
  misc_feature (12)..(12): 2'-deoxy-2'-fluoro
  misc_feature (13)..(13): 2'-O-methyl
  misc_feature (14)..(17): 2'-deoxy-2'-fluoro
  misc_feature (18)..(18): 2'-O-methyl
  misc_feature (19)..(19): 2'-deoxy-2'-fluoro
  misc_feature (1)..(19): ribonucleotide modified as described
  misc_feature (20)..(21): internucleotide phosphorothioate linkage
gcacucgcaagcacccuautt

SEQ ID NO: 1991 - DNA, 21 bp, Artificial Sequence
  Description of Artificial Sequence: synthetic
  misc_feature (4)..(4): 2'-O-methyl
  misc_feature (5)..(5): 2'-deoxy-2'-fluoro
  misc_feature (6)..(8): 2'-O-methyl
  misc_feature (9)..(9): 2'-deoxy-2'-fluoro
  misc_feature (10)..(10): 2'-O-methyl
  misc_feature (11)..(14): 2'-deoxy-2'-fluoro
  misc_feature (15)..(15): 2'-O-methyl
  misc_feature (16)..(17): 2'-deoxy-2'-fluoro
  misc_feature (18)..(19): 2'-O-methyl
  misc_feature (1)..(19): ribonucleotide modified as described
cucgcaagcacccuaucagtt

SEQ ID NO: 1992 - DNA, 21 bp, Artificial Sequence
  Description of Artificial Sequence: synthetic
  misc_feature (4)..(4): 2'-O-methyl
  misc_feature (5)..(5): 2'-deoxy-2'-fluoro
  misc_feature (6)..(8): 2'-O-methyl
  misc_feature (9)..(9): 2'-deoxy-2'-fluoro
  misc_feature (10)..(10): 2'-O-methyl
  misc_feature (11)..(14): 2'-deoxy-2'-fluoro
  misc_feature (15)..(15): 2'-O-methyl
  misc_feature (16)..(17): 2'-deoxy-2'-fluoro
  misc_feature (18)..(19): 2'-O-methyl
  misc_feature (1)..(19): ribonucleotide modified as described
  misc_feature (21)..(21): 3'-3 attached terminal deoxyabasic moiety
cucgcaagcacccuaucagtt

SEQ ID NO: 1993 - DNA, 21 bp, Artificial Sequence
  Description of Artificial Sequence: synthetic
  misc_feature (1)..(1): 2'-O-methyl
  misc_feature (2)..(2): 2'-deoxy-2'-fluoro
  misc_feature (3)..(3): 2'-O-methyl
  misc_feature (4)..(5): 2'-deoxy-2'-fluoro
  misc_feature (6)..(6): 2'-O-methyl
  misc_feature (7)..(7): 2'-deoxy-2'-fluoro
  misc_feature (8)..(11): 2'-O-methyl
  misc_feature (12)..(17): 2'-deoxy-2'-fluoro
  misc_feature (18)..(18): 2'-O-methyl
  misc_feature (19)..(19): 2'-deoxy-2'-fluoro
  misc_feature (1)..(19): ribonucleotide modified as described
  misc_feature (21)..(21): 3'-3 attached terminal deoxyabasic moiety
guaccacaaggccuuucgctt

SEQ ID NO: 1994 - DNA, 21 bp, Artificial Sequence
  Description of Artificial Sequence: synthetic
  misc_feature (1)..(1): 2'-O-methyl
  misc_feature (3)..(3): 2'-O-methyl
  misc_feature (4)..(5): 2'-deoxy-2'-fluoro
  misc_feature (6)..(6): 2'-O-methyl
  misc_feature (7)..(7): 2'-deoxy-2'-fluoro
  misc_feature (8)..(11): 2'-O-methyl
  misc_feature (12)..(17): 2'-deoxy-2'-fluoro
  misc_feature (18)..(18): 2'-O-methyl
  misc_feature (19)..(19): 2'-deoxy-2'-fluoro
  misc_feature (1)..(19): ribonucleotide modified as described
guaccacaaggccuuucgctt

SEQ ID NO: 1995 - DNA, 21 bp, Artificial Sequence
  Description of Artificial Sequence: synthetic
  misc_feature (1)..(1): 2'-O-methyl
  misc_feature (3)..(3): 2'-O-methyl
  misc_feature (4)..(5): 2'-deoxy-2'-fluoro
  misc_feature (6)..(6): 2'-O-methyl
  misc_feature (7)..(7): 2'-deoxy-2'-fluoro
  misc_feature (8)..(11): 2'-O-methyl
  misc_feature (12)..(17): 2'-deoxy-2'-fluoro
  misc_feature (18)..(18): 2'-O-methyl
  misc_feature (19)..(19): 2'-deoxy-2'-fluoro
  misc_feature (1)..(19): ribonucleotide modified as described
  misc_feature (21)..(21): 3'-3 attached terminal deoxyabasic moiety
guaccacaaggccuuucgctt

SEQ ID NO: 1996 - DNA, 21 bp, Artificial Sequence
  Description of Artificial Sequence: synthetic
  misc_feature (1)..(1): 2'-O-methyl
  misc_feature (2)..(2): 2'-deoxy-2'-fluoro
  misc_feature (3)..(3): 2'-O-methyl
  misc_feature (4)..(5): 2'-deoxy-2'-fluoro
  misc_feature (6)..(6): 2'-O-methyl
  misc_feature (7)..(7): 2'-deoxy-2'-fluoro
  misc_feature (8)..(11): 2'-O-methyl
  misc_feature (12)..(17): 2'-deoxy-2'-fluoro
  misc_feature (17)..(17): 2'-O-methyl
  misc_feature (19)..(19): 2'-deoxy-2'-fluoro
  misc_feature (1)..(19): ribonucleotide modified as described
  misc_feature (20)..(21): internucleotide phosphorothioate linkage
guaccacaaggccuuucgctt

SEQ ID NO: 1997 - DNA, 21 bp, Artificial Sequence
  Description of Artificial Sequence: synthetic
  misc_feature (1)..(1): 2'-O-methyl
  misc_feature (2)..(2): 2'-deoxy-2'-fluoro
  misc_feature (3)..(3): 2'-O-methyl
  misc_feature (4)..(5): 2'-deoxy-2'-fluoro
  misc_feature (6)..(6): 2'-O-methyl
  misc_feature (7)..(7): 2'-deoxy-2'-fluoro
  misc_feature (8)..(11): 2'-O-methyl
  misc_feature (12)..(17): 2'-deoxy-2'-fluoro
  misc_feature (18)..(18): 2'-O-methyl
  misc_feature (19)..(19): 2'-deoxy-2'-fluoro
  misc_feature (1)..(19): ribonucleotide modified as described
guaccacaaggccuuucgctt

SEQ ID NO: 1998 - DNA, 21 bp, Artificial Sequence
  Description of Artificial Sequence: synthetic
  misc_feature (1)..(1): 2'-O-methyl
  misc_feature (2)..(2): 2'-deoxy-2'-fluoro
  misc_feature (3)..(3): 2'-O-methyl
  misc_feature (4)..(5): 2'-deoxy-2'-fluoro
  misc_feature (6)..(6): 2'-O-methyl
  misc_feature (7)..(7): 2'-deoxy-2'-fluoro
  misc_feature (8)..(11): 2'-O-methyl
  misc_feature (12)..(17): 2'-deoxy-2'-fluoro
  misc_feature (18)..(18): 2'-O-methyl
  misc_feature (19)..(19): 2'-deoxy-2'-fluoro
  misc_feature (1)..(19): ribonucleotide modified as described
  misc_feature (21)..(21): 3'-3 attached terminal deoxyabasic moiety
guaccacaaggccuuucgctt

SEQ ID NO: 1999 - DNA, 21 bp, Artificial Sequence
  Description of Artificial Sequence: synthetic
  misc_feature (1)..(1): 2'-O-methyl
  misc_feature (2)..(2): 2'-deoxy-2'-fluoro
  misc_feature (3)..(3): 2'-O-methyl
  misc_feature (4)..(5): 2'-deoxy-2'-fluoro
  misc_feature (6)..(6): 2'-O-methyl
  misc_feature (7)..(7): 2'-deoxy-2'-fluoro
  misc_feature (8)..(11): 2'-O-methyl
  misc_feature (12)..(17): 2'-deoxy-2'-fluoro
  misc_feature (18)..(18): 2'-O-methyl
  misc_feature (19)..(19): 2'-deoxy-2'-fluoro
  misc_feature (1)..(19): ribonucleotide modified as described
guaccacaaggccuuucgctt

SEQ ID NO: 2000 - DNA, 21 bp, Artificial Sequence
  Description of Artificial Sequence: synthetic
  misc_feature (1)..(3): 2'-deoxy-2'-fluoro
  misc_feature (4)..(4): 2'-O-methyl
  misc_feature (5)..(5): 2'-deoxy-2'-fluoro
  misc_feature (6)..(8): 2'-O-methyl
  misc_feature (9)..(9): 2'-deoxy-2'-fluoro
  misc_feature (10)..(10): 2'-O-methyl
  misc_feature (11)..(14): 2'-deoxy-2'-fluoro
  misc_feature (15)..(15): 2'-O-methyl
  misc_feature (16)..(17): 2'-deoxy-2'-fluoro
  misc_feature (18)..(19): 2'-O-methyl
  misc_feature (1)..(19): ribonucleotide modified as described
cucgcaagcacccuaucagtt

SEQ ID NO: 2001 - DNA, 21 bp, Artificial Sequence
  Description of Artificial Sequence: synthetic
  misc_feature (1)..(2): 2'-O-methyl
  misc_feature (4)..(5): 2'-deoxy-2'-fluoro
  misc_feature (6)..(6): 2'-O-methyl
  misc_feature (7)..(7): 2'-deoxy-2'-fluoro
  misc_feature (8)..(11): 2'-O-methyl
  misc_feature (12)..(17): 2'-deoxy-2'-fluoro
  misc_feature (18)..(19): 2'-O-methyl
  misc_feature (1)..(19): ribonucleotide modified as described
  misc_feature (21)..(21): 3'-3 attached terminal deoxyabasic moiety
ggucuacgagaccucccggtt

SEQ ID NO: 2002 - DNA, 21 bp, Artificial Sequence
  Description of Artificial Sequence: synthetic
  misc_feature (1)..(2): 2'-O-methyl
  misc_feature (3)..(5): 2'-deoxy-2'-fluoro
  misc_feature (6)..(6): 2'-O-methyl
  misc_feature (7)..(7): 2'-deoxy-2'-fluoro
  misc_feature (8)..(11): 2'-O-methyl
  misc_feature (12)..(17): 2'-deoxy-2'-fluoro
  misc_feature (18)..(19): 2'-O-methyl
  misc_feature (1)..(19): ribonucleotide modified as described
ggucuacgagaccucccggtt

SEQ ID NO: 2003 - DNA, 21 bp, Artificial Sequence
  Description of Artificial Sequence: synthetic
  misc_feature (1)..(2): 2'-O-methyl
  misc_feature (3)..(5): 2'-deoxy-2'-fluoro
  misc_feature (6)..(6): 2'-O-methyl
  misc_feature (7)..(7): 2'-deoxy-2'-fluoro
  misc_feature (8)..(11): 2'-O-methyl
  misc_feature (12)..(17): 2'-deoxy-2'-fluoro
  misc_feature (18)..(19): 2'-O-methyl
  misc_feature (1)..(19): ribonucleotide modified as described
  misc_feature (21)..(21): 3'-3 attached terminal deoxyabasic moiety
ggucuacgagaccucccggtt

SEQ ID NO: 2004 - DNA, 21 bp, Artificial Sequence
  Description of Artificial Sequence: synthetic
  misc_feature (1)..(2): 2'-O-methyl
  misc_feature (3)..(5): 2'-deoxy-2'-fluoro
  misc_feature (6)..(6): 2'-O-methyl
  misc_feature (7)..(7): 2'-deoxy-2'-fluoro
  misc_feature (8)..(11): 2'-O-methyl
  misc_feature (12)..(17): 2'-deoxy-2'-fluoro
  misc_feature (18)..(19): 2'-O-methyl
  misc_feature (1)..(19): ribonucleotide modified as described
ggucuacgagaccucccggtt

SEQ ID NO: 2005 - DNA, 42 bp, Artificial Sequence
  Description of Artificial Sequence: synthetic
  misc_feature (1)..(19): ribonucleotide modified as described
  misc_feature (21)..(22): internucleotide hexethelyne glycol
  misc_feature (22)..(40): ribonucleotide modified as described
ccgggaggucucguagaccttcugauagggugcuugcgagtt

SEQ ID NO: 2006 - DNA, 42 bp, Artificial Sequence
  Description of Artificial Sequence: synthetic
  misc_feature (1)..(19): ribonucleotide modified as described
  misc_feature (21)..(22): internucleotide hexethelyne glycol
  misc_feature (22)..(40): ribonucleotide modified as described
cugauagggugcuugcgagttgcgaaaggccuugugguactt

SEQ ID NO: 2007 - DNA, 42 bp, Artificial Sequence; identical to SEQ ID NO: 2005
  Description of Artificial Sequence: synthetic
  misc_feature (1)..(1): 5'-3 attached deoxyabasic moiety
  misc_feature (1)..(2): 2'-deoxy-2'-fluoro
  misc_feature (3)..(8): 2'-deoxy
  misc_feature (9)..(12): 2'-deoxy-2'-fluoro
  misc_feature (13)..(13): 2'-deoxy
  misc_feature (14)..(14): 2'-deoxy-2'-fluoro
  misc_feature (15)..(17): 2'-deoxy
  misc_feature (18)..(19): 2'-deoxy-2'-fluoro
  misc_feature (1)..(19): ribonucleotide modified as described
  misc_feature (21)..(22): internucleotide hexethelyne glycol
  misc_feature (22)..(23): 2'-deoxy-2'-fluoro
  misc_feature (24)..(25): 2'-deoxy
  misc_feature (27)..(27): 2'-deoxy-2'-fluoro
  misc_feature (27)..(31): 2'-deoxy
  misc_feature (32)..(32): 2'-deoxy-2'-fluoro
  misc_feature (33)..(33): 2'-deoxy
  misc_feature (34)..(36): 2'-deoxy-2'-fluoro
  misc_feature (37)..(37): 2'-deoxy
  misc_feature (38)..(38): 2'-deoxy-2'-fluoro
  misc_feature (39)..(41): 2'-deoxy
  misc_feature (22)..(40): ribonucleotide modified as described
  misc_feature (42)..(42): 3'-3 attached deoxyabasic moiety

SEQ ID NO: 2008 - DNA, 42 bp, Artificial Sequence; identical to SEQ ID NO: 1978
  Description of Artificial Sequence: synthetic
  misc_feature (1)..(1): 5'-3 attached deoxyabasic moiety
  misc_feature (1)..(2): 2'-deoxy-2'-fluoro
  misc_feature (3)..(8): 2'-deoxy
  misc_feature (9)..(12): 2'-deoxy-2'-fluoro
  misc_feature (13)..(13): 2'-deoxy
  misc_feature (14)..(14): 2'-deoxy-2'-fluoro
  misc_feature (15)..(17): 2'-deoxy
  misc_feature (18)..(19): 2'-deoxy-2'-fluoro
  misc_feature (1)..(19): ribonucleotide modified as described
  misc_feature (21)..(22): internucleotide hexethelyne glycol
  misc_feature (22)..(22): 2'-deoxy
  misc_feature (23)..(23): 2'-deoxy-2'-fluoro
  misc_feature (24)..(29): 2'-deoxy
  misc_feature (31)..(34): 2'-deoxy-2'-fluoro
  misc_feature (34)..(34): 2'-deoxy
  misc_feature (36)..(36): 2'-deoxy-2'-fluoro
  misc_feature (36)..(37): 2'-deoxy
  misc_feature (39)..(39): 2'-deoxy-2'-fluoro
  misc_feature (39)..(39): 2'-deoxy
  misc_feature (41)..(41): 2'-deoxy-2'-fluoro
  misc_feature (22)..(40): ribonucleotide modified as described
  misc_feature (42)..(42): 3'-3 attached deoxyabasic moiety

SEQ ID NO: 2009 - DNA, 42 bp, Artificial Sequence; identical to SEQ ID NO: 2006
  Description of Artificial Sequence: synthetic
  misc_feature (1)..(1): 5'-3 attached deoxyabasic moiety
  misc_feature (1)..(2): 2'-deoxy-2'-fluoro
  misc_feature (3)..(4): 2'-deoxy
  misc_feature (5)..(5): 2'-deoxy-2'-fluoro
  misc_feature (6)..(9): 2'-deoxy
  misc_feature (10)..(10): 2'-deoxy-2'-fluoro
  misc_feature (11)..(11): 2'-deoxy
  misc_feature (12)..(14): 2'-deoxy-2'-fluoro
  misc_feature (15)..(15): 2'-deoxy
  misc_feature (16)..(16): 2'-deoxy-2'-fluoro
  misc_feature (17)..(19): 2'-deoxy
  misc_feature (1)..(19): ribonucleotide modified as described
  misc_feature (21)..(22): internucleotide hexethelyne glycol
  misc_feature (22)..(22): 2'-deoxy
  misc_feature (23)..(23): 2'-deoxy-2'-fluoro
  misc_feature (24)..(29): 2'-deoxy
  misc_feature (30)..(33): 2'-deoxy-2'-fluoro
  misc_feature (34)..(34): 2'-deoxy
  misc_feature (35)..(35): 2'-deoxy-2'-fluoro
  misc_feature (36)..(37): 2'-deoxy
  misc_feature (38)..(38): 2'-deoxy-2'-fluoro
  misc_feature (39)..(39): 2'-deoxy
  misc_feature (40)..(40): 2'-deoxy-2'-fluoro
  misc_feature (22)..(40): ribonucleotide modified as described
  misc_feature (42)..(42): 3'-3 attached deoxyabasic moiety

SEQ ID NO: 2010 - RNA, 21 nt, Artificial Sequence
  Description of Artificial Sequence:  synthetic
  misc_feature (4)..(4): 2'-O-methyl
  misc_feature (5)..(5): 2'-deoxy-2'-fluoro
  misc_feature (6)..(8): 2'-O-methyl
  misc_feature (9)..(9): 2'-deoxy-2'-fluoro
  misc_feature (10)..(10): 2'-O-methyl
  misc_feature (11)..(14): 2'-deoxy-2'-fluoro
  misc_feature (15)..(15): 2'-O-methyl
  misc_feature (16)..(17): 2'-deoxy-2'-fluoro
  misc_feature (18)..(21): 2'-O-methyl
cucgcaagcacccuaucaguu

SEQ ID NO: 2011 - RNA, 21 nt, Artificial Sequence
  Description of Artificial Sequence:  synthetic
  misc_feature (4)..(5): 2'-deoxy-2'-fluoro
  misc_feature (6)..(6): 2'-O-methyl
  misc_feature (7)..(7): 2'-deoxy-2'-fluoro
  misc_feature (8)..(11): 2'-O-methyl
  misc_feature (12)..(17): 2'-deoxy-2'-fluoro
  misc_feature (18)..(21): 2'-O-methyl
ggucuacgagaccucccgguu

SEQ ID NO: 2012 - RNA, 21 nt, Artificial Sequence
  Description of Artificial Sequence:  synthetic
  misc_feature (4)..(4): 2'-O-methyl
  misc_feature (5)..(5): 2'-deoxy-2'-fluoro
  misc_feature (6)..(8): 2'-O-methyl
  misc_feature (9)..(9): 2'-deoxy-2'-fluoro
  misc_feature (10)..(10): 2'-O-methyl
  misc_feature (11)..(14): 2'-deoxy-2'-fluoro
  misc_feature (15)..(15): 2'-O-methyl
  misc_feature (16)..(17): 2'-deoxy-2'-fluoro
  misc_feature (18)..(21): 2'-O-methyl
cucgcaagcacccuaucaggc

SEQ ID NO: 2013 - RNA, 21 nt, Artificial Sequence
  Description of Artificial Sequence:  synthetic
  misc_feature (4)..(5): 2'-deoxy-2'-fluoro
  misc_feature (6)..(6): 2'-O-methyl
  misc_feature (7)..(7): 2'-deoxy-2'-fluoro
  misc_feature (8)..(11): 2'-O-methyl
  misc_feature (12)..(17): 2'-deoxy-2'-fluoro
  misc_feature (18)..(21): 2'-O-methyl
ggucuacgagaccucccgggc

SEQ ID NO: 2014 - DNA, 21 bp, Artificial Sequence
  Description of Artificial Sequence:  siNA sense region
  misc_feature (1)..(1): optionally attached terminal abasic, inverted abasic, inverted nucleotide or other terminal cap moiety
  misc_feature (21)..(21): optionally attached terminal abasic, inverted abasic, inverted nucleotide or other terminal cap moiety
  misc_feature (1)..(19): n stands for any ribonucleotide
  misc_feature (20)..(21): n stands for any nucleotide
nnnnnnnnnnnnnnnnnnnnn

SEQ ID NO: 2015 - DNA, 21 bp, Artificial Sequence
  Description of Artificial Sequence:  siNA antisense region
  misc_feature (21)..(21): optionally attached terminal glyceryl, abasic, inverted abasic, inverted nucleotide or other terminal cap moiety
  misc_feature (20)..(21): Optional phosphorothioate or phosphorodithioate internucleotide linkage
  misc_feature (1)..(19): n stands for any ribonucleotide
  misc_feature (20)..(21): n stands for any nucleotide
nnnnnnnnnnnnnnnnnnnnn

SEQ ID NO: 2016 - DNA, 21 bp, Artificial Sequence
  Description of Artificial Sequence:  siNA sense region
  misc_feature (1)..(19): n is any ribonucleotide wherein any pyrimidine present is 2'-Fluoro and any purine is 2'-O-methyl
  misc_feature (20)..(21): n stands for any nucleotide
  misc_feature (20)..(21): Optional phosphorothioate or phosphorodithioate internucleotide linkage
nnnnnnnnnnnnnnnnnnnnn

SEQ ID NO: 2017 - DNA, 21 bp, Artificial Sequence
  Description of Artificial Sequence:  siNA antisense region
  misc_feature (1)..(19): n is any ribonucleotide wherein any pyrimidine is 2'-Fluoro and any purine is 2'-O-methyl
  misc_feature (20)..(21): n stands for any nucleotide
  misc_feature (20)..(21): Optional phosphorothioate or phosphorodithioate internucleotide linkage
  misc_feature (21)..(21): optionally attached terminal glyceryl, abasic, inverted abasic, inverted nucleotide or other terminal cap moiety
nnnnnnnnnnnnnnnnnnnnn

SEQ ID NO: 2018 - DNA, 21 bp, Artificial Sequence
  Description of Artificial Sequence:  siNA sense region
  misc_feature (1)..(19): n is any ribonucleotide wherein any pyrimidine is 2'-O-methyl or 2'-Fluoro
  misc_feature (20)..(21): n stands for any nucleotide
  misc_feature (1)..(1): optionally attached terminal abasic, inverted abasic, inverted nucleotide or other terminal cap moiety
  misc_feature (21)..(21): optionally attached terminal abasic, inverted abasic, inverted nucleotide or other terminal cap moiety
nnnnnnnnnnnnnnnnnnnnn

SEQ ID NO: 2019 - DNA, 21 bp, Artificial Sequence
  Description of Artificial Sequence:  siNA antisense region
  misc_feature (1)..(19): n is any ribonucleotide wherein any pyrimidine is 2'-Fluoro
  misc_feature (20)..(21): Optional phosphorothioate or phosphorodithioate internucleotide linkage
  misc_feature (20)..(21): n stands for any nucleotide
  misc_feature (21)..(21): optionally attached terminal glyceryl, abasic, inverted abasic, inverted nucleotide or other terminal cap moiety
nnnnnnnnnnnnnnnnnnnnn

SEQ ID NO: 2020 - DNA, 21 bp, Artificial Sequence
  Description of Artificial Sequence:  siNA sense region
  misc_feature (1)..(19): n is any ribonucleotide wherein any pyrimidine is 2'-Fluoro and any purine is 2'-Deoxy
  misc_feature (20)..(21): n stands for any nucleotide
  misc_feature (1)..(1): optionally attached terminal abasic, inverted abasic, inverted nucleotide or other terminal cap moiety
  misc_feature (21)..(21): optionally attached terminal abasic, inverted abasic, inverted nucleotide or other terminal cap moiety
nnnnnnnnnnnnnnnnnnnnn

SEQ ID NO: 2021 - DNA, 21 bp, Artificial Sequence
  Description of Artificial Sequence:  siNA sense region
  misc_feature (1)..(19): n is any ribonucleotide wherein any pyrimidine is 2'-Fluoro
  misc_feature (20)..(20): Optional phosphorothioate or phosphorodithioate internucleotide linkage
  misc_feature (20)..(21): n stands for any nucleotide
  misc_feature (1)..(1): optionally attached terminal abasic, inverted abasic, inverted nucleotide or other terminal cap moiety
  misc_feature (21)..(21): optionally attached terminal abasic, inverted abasic, inverted nucleotide or other terminal cap moiety
nnnnnnnnnnnnnnnnnnnnn

SEQ ID NO: 2022 - DNA, 21 bp, Artificial Sequence
  Description of Artificial Sequence:  siNA antisense region
  misc_feature (1)..(19): n is any ribonucleotide wherein any pyrimidine is 2'-Fluoro and any purine is 2'-deoxy
  misc_feature (20)..(21): n stands for any nucleotide
  misc_feature (21)..(21): optionally attached terminal glyceryl, abasic, inverted abasic, inverted nucleotide or other terminal cap moiety
nnnnnnnnnnnnnnnnnnnnn

SEQ ID NO: 2023 - DNA, 21 bp, Artificial Sequence
  Description of Artificial Sequence:  siNA sense region
  misc_feature (1)..(1): optionally attached terminal abasic, inverted abasic, inverted nucleotide or other terminal cap moiety
  misc_feature (21)..(21): optionally attached terminal abasic, inverted abasic, inverted nucleotide or other terminal cap moiety
  misc_feature (1)..(19): ribonucleotide modified as described
gcgggccuugccuacuauutt

SEQ ID NO: 2024 - DNA, 21 bp, Artificial Sequence
  Description of Artificial Sequence:  siNA antisense region
  misc_feature (21)..(21): optionally attached terminal glyceryl, abasic, inverted abasic, inverted nucleotide or other terminal cap moiety
  misc_feature (20)..(21): Optional phosphorothioate or phosphorodithioate internucleotide linkage
  misc_feature (1)..(19): ribonucleotide modified as described
aauaguaggcaaggcccgctt

SEQ ID NO: 2025 - DNA, 21 bp, Artificial Sequence
  Description of Artificial Sequence:  siNA sense region
  misc_feature (1)..(19): ribonucleotide modified as described
  misc_feature (20)..(21): Optional phosphorothioate or phosphorodithioate internucleotide linkage
  misc_feature (1)..(1): 2'-O-methyl
  misc_feature (3)..(5): 2'-O-methyl
  misc_feature (10)..(10): 2'-O-methyl
  misc_feature (14)..(14): 2'-O-methyl
  misc_feature (17)..(17): 2'-O-methyl
  misc_feature (2)..(2): 2'-deoxy-2'-fluoro
  misc_feature (6)..(9): 2'-deoxy-2'-fluoro
  misc_feature (11)..(13): 2'-deoxy-2'-fluoro
  misc_feature (15)..(16): 2'-deoxy-2'-fluoro
  misc_feature (18)..(19): 2'-deoxy-2'-fluoro
gcgggccuugccuacuauutt

SEQ ID NO: 2026 - DNA, 21 bp, Artificial Sequence
  Description of Artificial Sequence:  siNA antisense region
  misc_feature (1)..(19): ribonucleotide modified as described
  misc_feature (20)..(21): Optional phosphorothioate or phosphorodithioate internucleotide linkage
  misc_feature (21)..(21): optionally attached terminal glyceryl, abasic, inverted abasic, inverted nucleotide or other terminal cap moiety
  misc_feature (3)..(3): 2'-deoxy-2'-fluoro
  misc_feature (6)..(6): 2'-deoxy-2'-fluoro
  misc_feature (10)..(10): 2'-deoxy-2'-fluoro
  misc_feature (15)..(17): 2'-deoxy-2'-fluoro
  misc_feature (19)..(19): 2'-deoxy-2'-fluoro
  misc_feature (1)..(2): 2'-O-methyl
  misc_feature (4)..(5): 2'-O-methyl
  misc_feature (7)..(9): 2'-O-methyl
  misc_feature (11)..(14): 2'-O-methyl
  misc_feature (18)..(18): 2'-O-methyl
aauaguaggcaaggcccgctt

SEQ ID NO: 2027 - DNA, 21 bp, Artificial Sequence
  Description of Artificial Sequence:  siNA sense region
  misc_feature (1)..(19): ribonucleotide modified as described
  misc_feature (1)..(1): optionally attached terminal abasic, inverted abasic, inverted nucleotide or other terminal cap moiety
  misc_feature (21)..(21): optionally attached terminal abasic, inverted abasic, inverted nucleotide or other terminal cap moiety
  misc_feature (2)..(2): 2'-O-methyl or 2'-Fluoro
  misc_feature (6)..(9): 2'-O-methyl or 2'-Fluoro
  misc_feature (11)..(13): 2'-O-methyl or 2'-Fluoro
  misc_feature (15)..(16): 2'-O-methyl or 2'-Fluoro
  misc_feature (18)..(19): 2'-O-methyl or 2'-Fluoro
aauaguaggcaaggcccgctt

SEQ ID NO: 2028 - DNA, 21 bp, Artificial Sequence
  Description of Artificial Sequence:  siNA antisense region
  misc_feature (20)..(21): Optional phosphorothioate or phosphorodithioate internucleotide linkage
  misc_feature (1)..(19): ribonucleotide modified as described
  misc_feature (21)..(21): optionally attached terminal glyceryl, abasic, inverted abasic, inverted nucleotide or other terminal cap moiety
  misc_feature (3)..(3): 2'deoxy-2'-Fluoro
  misc_feature (6)..(6): 2'-deoxy-2'-Fluoro
  misc_feature (10)..(10): 2'-deoxy-2'-Fluoro
  misc_feature (15)..(17): 2'-deoxy-2'-Fluoro
  misc_feature (19)..(19): 2'-deoxy-2'-Fluoro
aauaguaggcaaggcccgctt

SEQ ID NO: 2029 - DNA, 21 bp, Artificial Sequence
  Description of Artificial Sequence:  siNA sense region
  misc_feature (1)..(19): n is any ribonucleotide wherein any pyrimidine is 2'-Fluoro and any purine is 2'-Deoxy
  misc_feature (1)..(1): optionally attached terminal abasic, inverted abasic, inverted nucleotide or other terminal cap moiety
  misc_feature (21)..(21): optionally attached terminal abasic, inverted abasic, inverted nucleotide or other terminal cap moiety
  misc_feature (1)..(1): 2'-deoxy
  misc_feature (3)..(5): 2'-deoxy
  misc_feature (10)..(10): 2'-deoxy
  misc_feature (14)..(14): 2'-deoxy
  misc_feature (17)..(17): 2'-deoxy
  misc_feature (2)..(2): 2'-deoxy-2'-Fluoro
  misc_feature (6)..(9): 2'-deoxy-2'-Fluoro
  misc_feature (11)..(13): 2'-deoxy-2'-Fluoro
  misc_feature (15)..(16): 2'-deoxy-2'-Fluoro
  misc_feature (18)..(19): 2'-deoxy-2'-Fluoro
aauaguaggcaaggcccgctt

SEQ ID NO: 2030 - DNA, 21 bp, Artificial Sequence
  Description of Artificial Sequence:  siNA sense region
  misc_feature (20)..(20): Optional phosphorothioate or phosphorodithioate internucleotide linkage
  misc_feature (1)..(19): ribonucleotide modified as described
  misc_feature (1)..(1): optionally attached terminal abasic, inverted abasic, inverted nucleotide or other terminal cap moiety
  misc_feature (2)..(2): 2'-deoxy-2'-Fluoro
  misc_feature (6)..(9): 2'-deoxy-2'-Fluoro
  misc_feature (11)..(13): 2'-deoxy-2'-Fluoro
  misc_feature (15)..(16): 2'-deoxy-2'-Fluoro
  misc_feature (18)..(19): 2'-deoxy-2'-Fluoro
  misc_feature (21)..(21): optionally attached terminal abasic, inverted abasic, inverted nucleotide or other terminal cap moiety
aauaguaggcaaggcccgctt

SEQ ID NO: 2031 - DNA, 21 bp, Artificial Sequence
  Description of Artificial Sequence:  siNA antisense region
  misc_feature (1)..(19): ribonucleotide modified as described
  misc_feature (21)..(21): optionally attached terminal glyceryl, abasic, inverted abasic, inverted nucleotide or other terminal cap moiety
  misc_feature (1)..(2): 2'-deoxy
  misc_feature (4)..(5): 2'-deoxy
  misc_feature (7)..(9): 2'-deoxy
  misc_feature (11)..(14): 2'-deoxy
  misc_feature (18)..(18): 2'-deoxy
  misc_feature (3)..(3): 2'-deoxy-2'-Fluoro
  misc_feature (6)..(6): 2'-deoxy-2'-Fluoro
  misc_feature (10)..(10): 2'-deoxy-2'-Fluoro
  misc_feature (15)..(17): 2'-deoxy-2'-Fluoro
  misc_feature (19)..(19): 2'-deoxy-2'-Fluoro
aauaguaggcaaggcccgctt

SEQ ID NO: 2032 - RNA, 14 nt, Artificial Sequence
  Description of Artificial Sequence:  Target Sequence
auauaucuauuucg

SEQ ID NO: 2033 - RNA, 14 nt, Artificial Sequence
  Description of Artificial Sequence:  Complement to Target Sequence
cgaaauaguauaua

SEQ ID NO: 2034 - RNA, 22 nt, Artificial Sequence
  Description of Artificial Sequence:  appended target/complement
cgaaauaguauauacuauuucg

SEQ ID NO: 2035 - DNA, 24 bp, Artificial Sequence
  Description of Artificial Sequence:  Duplex forming oligonucleotide
  misc_feature (1)..(22): ribonucleotide modified as described
cgaaauaguauauacuauuucgtt

What we claim is:

1. A composition comprising a first double stranded nucleic and a second double stranded nucleic acid molecule each having a first strand and a second strand that are complementary to each other, wherein the second strand of said first double stranded nucleic acid molecule comprises sequence complementary to HCV sequence having SEQ ID NO: 1444 and the second strand of said second double stranded nucleic acid molecule comprises sequence complementary to HCV sequence having SEQ ID NO: 1417.

2. The composition of claim 1, further comprising a cationic lipid, a neutral lipid, and a polyethyleneglycol-conjugate.

3. The composition of claim 1, further comprising a cationic lipid, a neutral lipid, a polyethyleneglycol-conjugate, and a cholesterol.

4. The composition of claim 1, further comprising a cationic lipid, a neutral lipid, a polyethyleneglycol-conjugate, a cholesterol, and a surfactant.

5. The composition of claim 2, wherein said cationic lipid is selected from the group consisting of CLinDMA, pCLinDMA, eCLinDMA, DMOBA, and DMLBA.

6. The composition of claim 3, wherein said cationic lipid is selected from the group consisting of CLinDMA, pCLinDMA, eCLinDMA, DMOBA, and DMLBA.

7. The composition of claim 4, wherein said cationic lipid is selected from the group consisting of CLinDMA, pCLinDMA, eCLinDMA, DMOBA, and DMLBA.

8. The composition of claim 2, wherein said neutral lipid is selected from the group consisting of DSPC, DOBA, and cholesterol.

9. The composition of claim 3, wherein said neutral lipid is selected from the group consisting of DSPC, DOBA, and cholesterol.

10. The composition of claim 4, wherein said neutral lipid is selected from the group consisting of DSPC, DOBA, and cholesterol.

11. The composition of claim 2, wherein said polyethyleneglycol-conjugate is selected from the group consisting of a PEG-dimyristoyl glycerol and PEG-cholesterol.

12. The composition of claim 3, wherein said polyethyleneglycol-conjugate is selected from the group consisting of a PEG-dimyristoyl glycerol and PEG-cholesterol.

13. The composition of claim 4, wherein said polyethyleneglycol-conjugate is selected from the group consisting of a PEG-dimyristoyl glycerol and PEG-cholesterol.

14. The composition of claim 13, wherein said PEG is 2KPEG.

15. The composition of claim 4, wherein said surfactant is selected from the group consisting of palmityl alcohol, stearyl alcohol, oleyl alcohol and linoleyl alcohol.

16. The composition of claim 4, wherein said cationic lipid is CLinDMA, said neutral lipid is DSPC, said polyethylene glycol conjugate is 2KPEG-DMG, said cholesterol is cholesterol, and said surfactant is linoleyl alcohol.

17. The composition of claim 16, wherein said CLinDMA, said DSPC, said 2KPEG-DMG, said cholesterol, and said linoleyl alcohol are present in molar ratio of 43:38:10:2:7 respectively.

18. The composition of claim 1, wherein said first strand and said second strand of said first double stranded nucleic acid molecule comprise SEQ ID NOs: 1796 and 2010 respectively, and said first strand and said second strand of said second double stranded nucleic acid molecule comprise SEQ ID NOs: 1677 and 2011 respectively.

19. The composition of claim 1, wherein said first strand and said second strand of said first double stranded nucleic acid molecule comprise SEQ ID NOs: 1796 and 2012 respectively, and said first strand and said second strand of said second double stranded nucleic acid molecule comprise SEQ ID NOs: 1677 and 2013 respectively.

20. A composition comprising the composition of claim 1 in a pharmacuetically acceptable carrier or diluent.

21. A composition comprising the composition of claim 2 in a pharmacuetically acceptable carrier or diluent.

22. A composition comprising the composition of claim 3 in a pharmacuetically acceptable carrier or diluent.

23. A composition comprising the composition of claim 18 in a pharmacuetically acceptable carrier or diluent.

24. A composition comprising the composition of claim 19 in a pharmacuetically acceptable carrier or diluent.
